United States Patent Application Publication US 2020/0377945 A1 - sequence listing, part 25

SEQ ID NO: 4564 - DNA, 61944 bp, Unknown
  gut microbiota DNA sequence
tgtcaataaagaaggagaaatacaatcagtatattgtttgttataaatgtatgaatatattttcgtctgatgccttttttctgtcatctgtgatttttgttttctctttcttatacaagttacttcataaactcgcatcacatttataataaatagtgaggacgtttattataaacgggtcccaagtttattataaactatattttgccaaattcttcggaatgagaggaattaattaaacaaaatggggtgaaatccttgcggacttcaccccattcttactccttacaatgtactctcatacatgtaaattatatctttatgtctttatatttgtacgtttcatgcttttaattccggatttgtttctacaaatatacgaaatttaaaaggcaaagtcaatagggaagccgttttaatggtttcatttgtttctctttccgtataacttgtctatcagatcctgtcggccgatacgtcttaactcattcagaatattctttcgttcttccggcttataccagaagaagaattgtcgttgtgccagtttctcctgttgtgttttggcactgaatacaggctccagtgtatagggatgaaatccgctgtaccatgcttcggtggctacagtcatcggagtaggggtaaagtcctgtacttgctccagatgaaagtccagccgtttggtgataacagccagttccgccatgtcttcttccttgcagccggggtgtgaagagataaagtacggtataagttgctgacgcagattctcttcccggttgatacggtcaaatatttttttgaaagtttcaaactgttcgaatgaaggtttgcgcatgatggataacacccggtcgctggtatgctctggagctactttcaatcgtccgctcacatgattgacaatcaactcgcgtgtgtattcagccgtgctgcgattggtggcggcgtctttactctgatggagcaataagtcgtagcgcactccactgccgataaatgatttttttatgccggggatggcatctaccgctttgtatatgtccaataacgggcgatggtccgaattaagattcgggcatactttgggatgaatacatgacgggcgtttgcactttttgcatattgcttcatctttacccttcatctgatacatattggcggaaggacctccaaggtcacttaaataccctttgaagtcgggcaactgcatcacctcctttacttcattcaagatagactccttgctgcggctgacgataaactttccctgatgtgcggaaatggtgcagaatgcacaaccgccgaagcatccccgatggatgttgacggagaactttatcatatcatatgcgggaatccgctttcctttgtatttaggatggggaaggcgggtatagggtagatcgtacgaatgatcaagctcttcctgactcatcggaggataaggaggattgacaatgactactttattatctacctcttgtgtgatacgggaagccgcatatttattggattcttcttcgatgtgccggaaattgctggcctgtttctttttatcagccagacactcttcatgtgagtaaagctgaatatcgtctgcggcaggagtccactctgtcgcacggcagagataggctgtctgagggatggttcccgctattttcttgagttcgccggctgtcaatgaagcatcttccataggaagcagttccttcattttccgggttagctctactatcggcttttctcccataccatagatcagcaagtctgcgccactatcgcataagatacttttctgaactttattctgccagtaatcataatgactcagacggcgcaaactcgcttcaatacttcctaatataacaggaacgtccggatagagtctttttagaatctgactgtatacgatggagggatactccggacgcatatccggacgaccgtccggagtgtacgcatcctcactgcgcagacgcttgttggcagtgtatttgttaaccatcgagtccatacttccggcagagatgccgaagaataatcggggacgacccagctttctgaagtcacgcaggtcatcacgccagttgggctgggggatgatcgcaactttcaaaccttccgcttcgaggatacgtccgatgacggcagcgccaaatgagggatggtctacgtaagcatcaccgctgaaaagaatgacatccagttcatcccatccgcggagttccacttctttcttggtggtaggtaaccaatcggtcaatcgatattctttcatgccgcaaagatacggataataaaaaacatcccaatgatttttttattcattgggatgtttaacttcaatcattaagatgttttttaaaacttctcattgattgtaaattgcaatgtcatttgctctccgtcatagatttcacgaaaaccgatgctttgctcggaaagatattcctttaagtcttggaaagcatctgcatgattcatgataatttcgagcgtttcaccgaaaggagcctcgcatatagctttgattgcaggaatcaaaggactgtaagctgttgttccgcaggtatctaccgtaatcattattcttcctcctcttccgcatcctgagtggaaagccaggtgagatagagcttgatgagttgttgcaggccaaatgctttcatgttattgtgataaataacatctatgcaaagatccagcaattctttactgtcctcttcctgactggcaatcagggaacgaatatttagtttcagtttatccagtacgggttcgtctacaattccggtactatcaatgagatggcggaataaggcatatttttcgattgttttcagattttcgctggacacctctatgctgcgtgtaccgctagggtttgcttgtatagtatacatcgttttttagttttaagggttattactaggagcaaagatagaatttaaaatgaaaaacggattaaaaaagcccggatatttttatccgggctttcagaaaataaatcttatatccgtgagtactttatttctgagtaaagaaacctagtatccctgccataatgctggctcgatctgtttcggactgaatgctttcgaaaggaaagccgagtataaaggtacgatagtccgcccctttgtaagcaatgcctgccgactgattgccacgtgcataagtaaatactggaaatgcgggagctaccggaacaatacaatccggtgctgtaacagcataactgttttcattgggcaggcgggggatcgtgatgctgcgtcctaatccattgatttgaccggaacttttgtctgtcagactgttctgataaccgtatttcaaaactttttctgtaaactcccggttcccttgtgttccgctcatgtcacttcccacatacgcaccgctgacgaacaaattacctcctgactggcaatagcttgtaatcagtctttgcatcggtgaagagaatgttttgtaatatgctttggctatcgggtcttccttttcaagtccgagtatatagtctacgatcgggtaatcttctaaagtgacgattccattttctaccgcttcgtcgctgcacgaaacaaaactgtatttccctgctgcctgaatggcttttccatggatgaaaggataatcaaacgtatttcctgctatctccatgccttccagttctctgccgctatgtcccaggctgccttctccttcttttccggcttgtgaacggttgaatccgctttgtgccccacaaaaagagatattggacaaataaggcactcccggatcctgttccaaatcaaatccggctttgtccggtgtgttaatgacagccggaccgctgattctgtcgaatccattgataatcaagattctctctcgttcacgttttgccttataagccgaaaggatttcagaaggaaaactttctcctccccggtttacggctgtcactttgaatgaatagacaagtcccggttctactttgacactgtaatagggtctgctgaccagagttccgttgtcgaatcctccgtatccgatgcgtgtatataccatatattcccgtggacgggctgtcggttccagtggatcgtcttcccctttccaagtaagttccagtgtatttttcttttttccgaaatggatagcgaagttgctgaccggcagaggttgcactacatagtctttgccatgttgactgtttataaattgcaggatacctttgtagatagcacgtcctacggtaaacttgaaattcggattatgaccgagctgcatatctgcaaagttctgatgagagagcaattcgataatcgtggaaggagtagcaggaagtcgtgtctcactgtaattccggttccacatgctgcggcgtgtccatggtagattgtagttcgtacgaatatctttctgaatttgagtcagcaggatatccgcaagatcacgtgaagcatatctgtccattcccgaatttagtttgccattattgaaatcggtggtatagataccgagcgaaccgatgatttcatcgtctttactgcatcctgcgtcactatgaagtgccatagtcatttccagaggtacacctaaacccgcttgtcccggattatagacagagcctcccgacagatagttgattgtattggaacgtgtattgatatcgtctgtataatcgttttctcctttacgcccggcatatacatcgtatggcataccggcccactgggatgaatatcgtgctccttccagataacggggaagtccgcttatttttcctcctcgtgagatattacccattccgcctccgaagcgtacggcatctgcacacactacgccatgctcgctactttcattactaagcacaaccataccgtagtcattatttcctttgtcaaactcaaaagttccgagatacacccaagtaccgccgcctattttctgattgaccttaaattccgtgacacccccattatgaaagacgaggtatttggcatcgctcacgctattgggtagtgtctgatatgaaacatagaccgcatattttccggttgccggcagggtaggtacccattcggcaaaagcctgatccttattcttcttttttttcttttctgtttgaatatatcggctggtaccgtcagtgaaagggttttccccatctttgtaaatggcttttttctgggcgaatcctttcacggaagtagtcgtccagcgtgccttcttactgcctgcttccaggtaaagggaagcattcggagtatcgttgtcaacgatgatttcattcttttgtgtgtcccgttcgcgaggagtatacactatggcaccagcattttccaacatcggaatgacatatggaagaatgaaagattgagtgaacatatcttctgtagtgcagaataatcgggggcgttgccatccccattcgcctttgtcattcttataataattaccgtgactttgccagagggcaatatgccggtcctgcaatcctcgggatatctcattggggcgggaagtgtttttcacccatggagcacctttgtattcggtgttcagcgccattcgttctttatcctttttcttgcttctgtataagttgggaactaattcttcaatgggctttccatctgcataaatggtgatctgataatagtttaccggaccggggagtaattctttcatctgattgtagatggtttctaccgtttccggcagaaatggctggtaggcgaagctttccgaagcataaatctgaatggttctgcggtcataatcaatatcgaaactgttcagtttcggtgtactgatttttgctgtcgctgtgtatttggcaaagtaatccgttaaccgctcttttatatttctctcaatgtcctgagcgaagagaagactggtgcccattgtcaggcacagaagaaagactattatttttttcatcgttccactctttaggttgcatcctatgattatctatgtccgccactttccccttgatggcatttccccttttggaaggagaatacgaaatgaatctcgcattcatgtaagtccattgcattctgtggcaaaatctcctgcaaaaataaacaaaaaaagagtgggaagtatcgaactgcccactcttctttgattgttttatattctattaattaagaatcttctttcttatagaggaatgtattctacaaatgcctccattgcttcatacgatgccagtcctaactgatcgtacaacgttgctgtgccacggttacggtcttcactacgttgccagaacagacgttcgtcattacctaagaacggagcgctttccatctgcgactgatgcttcaggatagaattacgttttgcacgaagctcttccggactgataggcacagccatttcgatgttctcaatttcccattctgcccacgcaccacggtacatccagatacgacagtctttcaaccatttggctccttcttctttttcaagatcgacagcagcgaatacggcatccgtacatacacggtgtgtaccgtgtgggtcagccaaatcaccggctacgaaaatctgatgaggctttatttcacgaagcaggttacgtacgatctctacgtcagcctcgctaatcggatttttctgaatcttgccggtttcatagaacggcaagtcaaggaaatgtacccgatctaacggaatattattgtaagaagaagcggtacgggcttcaccacgacgaatcaaacctttgatagtcagaatgtcacggctgtccatatcaccgtctttcttttctttcaggaatttgcgtatttctgcatatttctcgctgattaccaagtcttcgctgttattgaaaatctgattgaatccgttaatgaaatgcatgaaacgaaccacttcctcatcacctacggcaatgttaccggaagtttcgtaagctacgtgtacctcatgcttctgttctaccaggcggcggagggttccacccatggagataacgtcgtcatccggatgcggagagaagataaccacacgtttcggatacggtttggcacgttccggacggtaggtatcatcagcattaggtttgccacccggccatccggtgatggtatgctgcaagtcattgaaaatcttgatatttacattgtaagcagaaccaaacaatgccagaagttcgctcagaccgttttcgttgtagtccttgttggtcagcttcagaatcggtttgcctgtcaactggcacagccatacgatagcgctgcggatcagtttatcattccactcgcaggatgttaccaaccatggacgttggatgcgtgttaagttcatggaagccgaaaggtcgatcgctacatgagcattgttgtgagtttgcagataagatgcaggaatagtgtcgctaatcggaccttccacacattctttgatcattgctgccttattttccccccatgccagcaaatatacctttttagcgccaagaatggtagatactcccattgtgatagaactgatcggagtattttctatcgttccgaaaatcttggatgcttcgttgcgcgatgcattgtccaataagatcagacgtgtggtagagttcagacgtgaacccggttcgttgaatgcgatattacctacacgaccgatacccagcagggcaatgtcaatacctccgaaactttcgatgcgctgttcgtacagacggcaatattcaaagatggtatctttggcgatggttccatcgggagtgaatatattctgtttgtcaatatcgacatgatccagcaacatttctttcaaagcattgaagttgctgttgatagcatcggctgtcaacggatagtattcatacatattaaatacgatcacgttacggaagctcagtccttcttccttatgcatgcggatcagttccgaatagacatgactgggtgagttacctccggggagtgctagtacgcaaaagcgtcctgctttctgtttttcgcggatggtttgtgctatttcgcaagcaatgtagttagccccttcttctacagactcataaatgtctgtaggtattttctcgagtcttgtcaagactgatttttcaaatgcattctccggtctgtagtatctgggggagaccctgtggagagtgatttgagaactaagatttgttttcataaagttgttaattaagttatgtaagattagagtccttacgactgtattttcacgacaaagatacaaaagaagtctatataattaactactaacttctaggtattgttgcaccttcaaatcgtttttaacatttgttttatcacgaatggctgagttggaattcgtctgcatctttccataccggaaacttttctctgaactgatgaagtgcggtcagatgaagcgtagcggttgctatgccctccgtttcgtcgggcacggaagccgcttcttctccgagcgctgaatagattttacttcctccgttgtatttcagatgatatccgtctatacctactctgttgaccccgcatacgtaacactgattttccaaggcacgggcacgaagcagtgtatcccatgccagacggcgggggataggccaatttgctacatatattaataggtcatattgattggctacgttccggctccacaccggaaaacgaagatcgtagcatacaagcaggcagatattccagccacggtaagggataatcagacgttcatcgcctgccgagaaatgttctgcctcacgtcccatgcggaacagatggcgtttatcataatagaattcttctccttccggcgtcagaaagaaagcgcgattgtaatatcttccgttgtctacagtgatataactcccgcagatggccacttgaaacaaagaagcccattgtttcagtgctgtaatcgtctcaccggaatttgcttccgccagcatatcactctgcatactgaatcctgtagaaaacatctccggtaaaacaacaatctccgttgttccacggagactttgcagcttctcgtggagcaaacggagattttcttgtttgttttcccaaacgatatcggtttgtactatggaaatacgaatcgaatccatgatgcctgttttaagtaatagggaataagtaataggtaataagtaataggtaatataccatgcggagcagcatttcagcagctacgattaatacctattacttattactttattcttaaagttctccaagtgcaaaattctcaggatgttttcctttgaaatccttgaagtacagtttgatttcccgcatatctttattaagatctcccgtcggcataattgctttagtggacgttatggtctttgtactatagtcaataccgatcagaacgataggcacttgagccttaagggcgatgtaataaaacccttttttccagttcgggttcgccttgcgggttccttcgggtgtgatagccagatgaaactttttgcattcagcaaaatgatgaaccatctggtcgaccaacgaagttttccgactacggtctacgggaattccgcctacagctttaaaaataattcctaacggaaaaaagaaccactcttttttcatcatgaaacttgttttacggcctagtgctccataaaacagttttccaataaataaatcaaggttcgttgtgtgtggtgcggcacatatcacgcatttatcataattaggtaccgtaacgtttgtcttccaccctaacaggcggtaatagataaagctataaattgctttcttcattctgatctttaattcaatttcccgatggcctcaataatctcgttaacttttgcattgaaatctactcggaatttcttataaaagcctttcacattgcccggctctgtatggctgatgcggctgacaaattcatcctgcattcttaaaacttcagccatcagttcatcagctttagccttgtcagtaccagggataaacatactattgattaagcactcggtgaataattctcctgcgatatagtttacgttctttttaagttctcttctacttgccataatatttacatttaatggtgaataataaaaattacttggggtaaagatagggactttctttgattctagcgaataaatggattgaattttttctttttactatttgctctctaagtgtatcctgcttggatatacaattgattaatcaaccggattttgaaatattgaattaaaattgaacagatttaaatgaaatttagtcaaacggggaattgccctcgacaaggatgaggtatttttatttattactgttcccttttgaatgattatagtactttttcccttttgaaaagaattatctttgaataattacttggcaataagatttttaatagctataattaattaaatgaaaaacaatggatttagatttatctaaaagaagtaagccctgttttaagaaaaataggatgatgtcaatgggaaaagtaaagaatccttttttaaagctttgtggtattgggttgttgacagtaatatgtatttctgttaaagcccaaaaagtaaactttacagtgaattcgaaaactggagccatacaatcaatgaatattgataatgataaacagaatatgaattggctgattgcaacagatggtagccaatatccttggataaaggagaattatggttggggacttggctatttcactgaggtgagaagaaatcagaaaaacaagttgttttggaatcttcctgccagtataaagcaggatgggagagaagttacttatcgagttggagatatatgtatccttgtagaaaggagtatgagaggagaagatttaatagaagagtatactttccaaaatgatggaacagaggaaatacttttatcggatataggcatctatactccattcaacgataactatccaggggcacaagcttgtataaatatgcgggctaatgctcatatatgggagggtgataatgcagcttatgtaaacgcaacacgtatgggaggatatgctccacatttgggactggttttgagggaaggcgaaattaaaagttatgaaatatcagagcgtgatagaaataagggtaactctcatacaagaggaattatttctttgaatcttccggatatgaaattgatgccgggtgatgaacaagtattttcgtggtatatcttttcgcataaaggtggagatgatttccgtcaaaagttattggaaagagagagtgtctgggtatcttgcaacaagtatgtatttgagaagggagaaactgcccttgtgaaaatatcaggtgggcagatggtaaaagactgtatacttaaaaagaatgatgtcactatccctatgaaaaaacaaggaacagcatggtatgctgaagtagtaatggatcagttgggagaagtgcgttttgatatactatatggcgcagggaaaaaaactcatgcaaattgtttggtgattagtaatgtgaatgatttgattaaaaaacgagtagagtttatagttgcaaatcaacagatgaaaagttcgaatacgcgtagagatgcttatatggtttatgataatgaaaagaatgaaatatatctgaataatacgcataactgtaatccggttgacagggatgaaggtgctgaaagagtcggtatgggggtacttttagcaaagtattatcaattgcatcctgttgctgaagtaaaggcgtctttattgcgatatgcaagttttttgcgtaatagattgcaagatgctgactataagactttctcttcagtcgatcagaagggacgtaacagggcgtacaattatgtatgggtagcggatttttatttccagatgtataaaataaccaatgacaaacaatatgctaaacatggttatatgactttgcggtctatgttcaaacagttcggacatggtttttatgccataggtataccggttcgcttaggactacaaactttaaaaaatgctgatatgcaaagagaatatcaagagctggagaatgattatattgcagttggtgatacttttttgaaaaatggtttgaattatccggctagtgaagtaaactacgaacaagccattgtagctccatcagtcatgttcttgcttcaactttatatggaaaccggaaggcagaaatatttggatggggcaaagattcaaatgcctgtattggaagctttcaatggcaaacaacccagttatcatttgaatgaaatagctgttcgtcattgggatggttattggtttggtaagcgggaaatgtggggagatacttttccacactattggagtacattgtcaggagctgctttttatctttattcgcaatgtacgggagatcattcatataaagagcgtgcagagaatattgtgagaaataatctgtgtttattctttgaagatggaaaagcttcttgcgcctatatttatccaaataaggttaacggagtaaagggcggattctacgatccatatgcaaatgatcaggattgggctttagtttattatttgcttgtacaaaatggtatatattaacgaataatggaatcgttaaatacagaaagcttaatagggtaacttttagtgatctattgtaaaatgaaaagccagtcaacatttaaatagttaactggctttttctaatattttgctttcttatttactgtggctttccgtaagcagcaaattcataaatgccatctgcccacattgcagaattgtttttatgtacattgacaacaccgtatacgcggagccgtaaatatctgtagagcgacggatcttcaatattcagaatcagaaatcctacctgccagtttaatttgccgtctacgagcattttataactttttccatcccggcttccttcaatggtatatttgtaggcagcctcggaaccgttaaccaatcttgtcgaaagattaatctcagaaatcacggcttctttctgcatatctatggtaaacatataaggagaacctgtagcagcatttgaagttttctggaaataagcagaagattctgtacaagctccatccgtgatacaatcagctttaattcctctcgctcctgggacagcggctgtcaccggtacatttaatgtcaggtttttgccgttctgaacagggataataccatatttgtcactaaattccaggtatctgtaataatccatcgaagcatatcctttgttaaatgcggctattgaaattctcgggaaattaccgtccggagttttatattttcgttgcgctccccagtggtaactccatactccgcaggtttttccaactgtactaattctattaaactgtgcatcaaaagtagaattgttgccgatttctctcataggtgtccattcacctcctaaatcagtggcagatgtatacatggtttgactcggataccatccggaagcctttgaactgaagaaatagtattctccgtcttttttgatgattgcaggagtttcccgatgcagtcctttacatattgtattaactaataaaacaggcttagtccatgaagtgtctagcttatagatatttatatctctgttcatatttgtagctgaaaggagataagctgtaccgtcatcgtcaatgaaaagagattggtctctagactcatggcccaatggtcgttccatagtgcctacttcgagctcacctttgggagttatttgtgccagatagattttagctgcaacatatccactttgatcttcataatgtgctgaaagtactaccttgccggtttttgcgttatatctgaaagcaataccctcaaattttacatttgggtaaaaagccagttcacgggaagcactccaactaccatcgagtcctgttggagaaaagctttctgtagctagccatcctttgagtgtttgtccatctatttccttttcaacgttttccattttataagagaaataaagatctccaattttcataccctgaggtttcttgatagattctttggtgatatatttcccgtttagattattataaattttagtttcgccgctaggggtaaaggttgttgcttgttgagaagcggacgtggctattttcttcccctctttaaatgcttctacatggtaggtaaaggttttatctgctttcagattataatcatcgtatgtatttcctttagcttctccaatacaatttccgtcccggtagattttataaaggtcagcgtcctctcgttgcatccaattcagttttacattgttgacggctttttcaccgacaagtttgaatacagtggcagtggctgcccagatatctgttgttataacttctttcgattgagttgcgaaagcaggttgcaaagacagactgcatagatatataaatatgaatagaaaactattttttgcctgttgactttttatgttcataatgtaacaaatttaatttatcagaattacatatgagaaatttattgggcttccatctgttttagattattagccttgtaggcagcagagaatatatctgcttccttatatttatatttattggaatcgaaatatactgcaaaatcttgcattaacttcttggatagttcagtcagatataaattacttccggcaaatgtatttgaaccggaaactgtaacatacttcttatccttcagattttgtatctgataataaccatcttcctgtaggttgaatacccagcattgagcatcatctttcttctcgggattgaggcgtaaagttccgaacagtgattccaagaactttccggttttggtatcttttattttatatacgttgggtatattagtctttataaactccagacttagattgatgtcatcatcatcatccgctatactgaaaccattggcaggtttagacactaaacgatcagaggtcttttctaataatgagtatatattaccgggtatgatttctgcagctcttttataacgatacatactattaaacacggttaaatcccattgatcataccattttacgacaggatagcctgagcgcatactaatgggcaaccacacatgatgagactttcctacatccttagagttccaacggtcacccatgtatatataagctttttctttaccctccactttaaatacataacagctttgtgagttgtaagtaacttgtttgagtttgtctacagcaaaattattccctgttgtccagttccccagtatatcagtactgtaggcacttctcccgggattgggttcccagcctgtgcaaccggaaaacaatccaaaatacatatccccaaccttaaaaatagcgggtgcctcatattttagtccctttaaaattttagtttctgttggagtcggctccagataatcgtctctaagtaatgcaatattcatgttggtattcatatccgtagaacagaaatgatatgcttttccgtctgtatctacgaataacgtctgatcacgggactcgtttttattagggcgaaatgttttgtaaagtacataaggccccattatcttatcgcttgttgctacacaaacacgtgcagctccatatccatctccactttcccaatggctccacattacccatttcttagtttggggattataaattactttaggacgttcaaacaaacgtccctgcgatatatcattcatgtcttctctggcttcacctgtcgttttcatcgacaaccccagccgtttccagttgtataagtctttagattgataacagcttaccccatttgatttaaaacctgtacgatcttctccaaaccaataataagttcctttttcgtaaacgacacatccaccgtgtgcgttaatttgctccccatctatgtcattccacaaaacacccggactgatctgggtgttttgtgaaaatacagaggtgaatgagaacataaagcagataaatagagttattctcatgttttcgttattttagtcttcaatgttaatcgttatttcaggctgtgctggtgcataggctccggattcatcaattgtgaaatattccacatcggcagtattatctataaaaccgaatttgggcgagtatgtacgtgatgtgccggtcagtttagcgttgtctacacggacagctccgatatcatttccccatcctccacgtcctactgtaaaggatacacgaatttggttacattcggcagaagtagtatagtccattgaataagtttcccagttgtcactggcaatttctgtgatgacttttttttcagggtcttgcacttcttctatgatcattttaccggtgagttttccttctttttttgctattcctccttttaatagagcagatagtgtgtaactttcattcggtacaacatctaccacttgcattaggataccatcactccagccagctgcccatttatagggtctaatttcaaaaacatgattgtccaggtcctgattattatcaatttcttcaggaagaatttgttgttctgaattccaacggtcgccaataacaacatcccacccctcaactctactaactaactttgtttctggatttacatcaaattctccttcgaagtttgggttcttcaaaagattttctactggtttgccaactttctctgcaaagtttggctggggagcgtagtctataattctaacggaatctacaggaattccatctctataaatgaaggcacggttatctggtgttatggcaaaacgataaacatgtgcttgtccatcattattatagaacttgccttttccccctgcttttccatttgttgcaggattattgatctcttttttgtaggcattgaataatccaatttcattagaggtaatatacgctttgaatccataacctttttcgtttacaaaataaggataaaagtttttctccgagtcatctgtttttattttgaactcaatagtatatccttttgaatttggagtgaatgctttggtaaattccgtatcattccctttcttataaacaggagatgctgcaatgtctttcactggaagggcagttccaaatccttttacttttatatatgaacggatatctccacttcgcagaataattttcccttcagtcagtcttttagtactgtttaaggtcactttcactttttgtttcccagagttggctgctataacagtcggagttacggtgaaaccgtttggagctgtaattgttatttctttgccgagtaaagcctcggaattgacaatgaaggatgatgatgcgtttgtaccattaatcgttagtaatggtagatgttcctctgttgaggtttgtaaggcttcattttcttttttatcatcttcgggttgaactgcataagtagctgttgtgctaattgtcagcaatgacaatgataaaaacataatctttacatatttttttttcatgatacagaaatgttttataaattaattatttatgattgaactgataatcagtgtttacttcttgtttgcaaagttgctgaatcatattcatatataggtgctggaatgattcaaatacgtataattttaagttatctgttcaaagtgggataaaaatcattcagaaaggtttaaaaatagaccacatatgtttgtgttagtcttaaattaatatattttaagggatttatgaacagtgatagctttctttattttaatattgcatagaaaatacgtctttatatttaattctactatgaaacatcaaataaaattctatatagtactgttttttattcaattgttttcgtgtgcctttgcacaacaaatgtcggtatctacacttccattaaataattatttgccgtcaagtactgttttacgggttcattgtgaccgggaaggctttttgtggctaggaaccaaagatggcttgtgtcgttatgatggctatcgattacttgtttttcgttctgggttgaaatcaccggatcttttgacgaataatgaaattacttgtattgcggaaaataaaaatggatatttatttataggaactaaaaaagggattaatatactggataagcgaacttatcagataataccagttatacacaatgatttgaaagatcaagagattcggacaatgatagtggatagtgatggatggatatgggttgggacgttaacttctgtttttcgttgttctgccgatttctcattttgcaaaagatatgattctactttacctgttactagtgtgaattctatttatgaagatgcagataagaatatttgggtaactttatgggaaaggggattacatcgatataattcaaaaacagactcatttattgctatgcctcatattggagttttaaataatccatttaaagtttttcaagataataagaagcaacattggattttaacatgggaaagcgggatctttttactttatccggaggagaaagatgatttaatgtatagtcatgtggatattaaaagtaatgagcattgggacatgaatggttgctttagtattactcaggatgataagtatggttatatatggattgtatctacacagggactttatgcacttcaaaaacgtcctggaaatataattaatactgtggatatatctcatatttcttctaagttaaataatatttttagtgaaatagtaaaagataagtcaggtaatttatggattgctgcctttaatgaaggagtatcaatgattgatttaaataaacctttagtacaaaattactcttttccagttattcgggaaaagacgggatttgttacaaatataaagaacatatatgaagataaggaaggagatttatggatagaccagaatcgttggggaataggaatttacaatccggattctaataaacttctcttttataaagatattccttctctaaaaaacattactaacttgagaaatgtaagctgcattacttctgctccattgcttaatgagatatggctggggtctgagtattatccggaaatttacagggtgaagaaggataaaaaagaaatagaactattggggactttgaaattaactgattatgtggataattcaggattcccgcgtttattttatgctgatagtaaccataacctttgggtgggaacaactaaaggtattttggttaaaccggcaaacgaaaagatacttcaagatgctaagtttccatttgtagatataataggaattggagaaggtaaagatggttccctatggattagtacaagaaagcaaggcgtgtataatgcaaaaatatcctctgatctgacattagaagagaaaaatttaagaaatctgaagactcacgcagagggagtaataagtgataatattggagcaatctgtgtggatgataatggcttggtgtggatgggtagccaggatggggatgtattcacttatgaccctcaaaccaataaagtggaaaacttatctgatatgtttgatatgcttgaagaaggtatttttaatattataacagatcagttgggacatatttggatttctaccaataagcgggtgattgaatacgaccctaaaaatggtggtatcatggattactcgacaatgactgatgtgatggtaaattcttttatgcctaattcttattataaaactcgttctgggaaaatactgtatggaggtaataaaggaatctcagtatttactccttatgatcatttgtctgataatcctcgtagaattagaacgatggtgtcagatgtcaagatagatggtgtttctagtcttttggagaaaaacaaccaacgttttaatttaagaagtcagatcatttctttaaatgcaggagataaaaatattgagatagatttttcttctttaaattatgcgtttcctgacaaaattaaatatgcatataaaatggatggagttgatgatgattgggtgtatgtcagaggcgatcgtcaatttgcattttacaatcaattacctaaaggtaaacgtactttttatctaaagacaactgatgtaaatggcttatggagcaattatatagcagaagttcaggtgtttaaacagcctgctttctatgaaacattgtgggcttatttattttatattgtgtttacacttttatgtctgtatcttttctatcacaggatgaagcgtcgtattcagttgcggcacgaactgagaatagctcaaatagataaagagaagtcagaagaattggtgcaaacaaaattacgttatttcacaaatatatcgcacgatttattaactcccttaactattattacttgtttgattgatgatgcggaaatgacgaatggtagtcggatttcgcagttaactatgattcgttctaatgtgaataaattacgtagactattacagcaaattttagatttccgtaaggtggaaagtgggaacatgaaattatctgtatcaaaaagtgatgtcatatcatttatagatgatgtttgtaaggtgaactttactccattgatgagaaagaaaaatcaaacctttacatttctaactgaagatagacatttgatggcttattttgatagagataaattagataagatagtatctaatttattatctaatgcttgtaaatatacagctaatggtggagatataaaattaatagtagattcatattgggagtctgaatatcatcatttacgaatacaggtcgttgataccggagaaggtattgctcctgctgatttggagaatgttttcaaaagattttatacaataaataaaggagatgaaagtgaatctaatgggattgggttatccttaacaaaggatttagtggagttacatcatggcactattaatgttgaaagtgaattaggtaagggaagtacttttactgtagatcttcccattaataaagatagttatcaggaagatgaattaatatcagaacatatttcggtaaatggcataaatacggatcttattttagagaaagaagaattgattgattcaaaggttggcgaaggcgaagatatgcaaatagctgacgttcatttgttattggtggaggataatgaagaattgttgtttttgatggagaaaattctatccaagcattatcatgtacttattgcaaaagatggattagaagctctgaacgttataaaagataatgaaatagatattattataagtgatgtgatgatgcctgaaatggatggtctagagttttgtcgcactttaaagtcaaatttggaaaccagtcacattcctatcatattattaacagctaaaaataccgtggaagatcgcattgaatgttataatgcgggagcggatggatatatatccaagccatttgaattaaaaatattagaggctcgtattaataattttataatgcataagaaaaacaaacaagaagagtttcgatctaatgtagaagtcaatattgattctttagaaccttcttctatggataaagagtttttggataaagtgatttctgttataaaatcaaatatgtcggaaggagattttgatgtggttcaattagcggatgcattagctgtgtctaagtcttctctatataggaaaatgaaaatagcaacaggactgtcacccattgagtttattcgaaatataagactaaaacatggtagtcagttattgaaggataaatcaatatctgtagcagaggtagcttatgaatgtggattttctaatcctaaatattttgcaacttgttttaaagaagaatttggtgtaactccaaaggaatatcaaaaatcttgttaggataaaaaataatatgaacttaaaatgcacaagtacgtatcttaatggaagatgcgtacttttctatatatcaatgatctatcccttttgaatgatttctgaacttatattgaacgatttttagacctatgatagttaatagcgattatggtccaattttggaggtttttgaatgattagagaacttctttctactggataactcgcacttttgtgatgcatttgatgcacaactaatacttatttggtctaaataactttataaatctaatagtatggtgataattttacctaatttctttttgcagaagcctgtttgtcgtttactggctgtcatgggctttttaggatttagtggagcgatagcgtctcaatcaagttcgcctgtgaatattgattctgtggagacctatatgaaaaaagactcttttgagaagaatgtaggatctcgtttcgttactaatcgtagtatagactcctttggggtgagtgatactgttgatatcaggatgttgcagcgctctcaatttttatctattcagcaattactgaaagggaatgtggccggtgtatatgtacaggaaaataatggagagcctggtaccattcaaagcatgctggttcgtggcttatcttcacctgtcttttcaaataaagatgtgtccggtgttcagccgacgatttatttgaatggtgttcctttgatgttggaaaacagctatgtgtacgatatcaaacagtttgatattaatccgataggagctgctgccaatatgttggcgggactggatatatcttccatagagtcaatagaaattatcaaggatccgcttcagcttgccaaattaggtcctttagctgccaatggcgccatctggataacgaccaaagacggttattatggtggggagaacgtctctatcggagtttcggcaggaatggcctttgctccgtcttcggttcgtatgacgaatggatcatacgaaaaagcattccgtcaacgtttctatgatacgtattctcttacaccgggcaaacaacccgattatcttatggatacaagagatgtacgttattttggtaaaccggactgggcagacgattattatcagtcatcactcttatataatgtaaatgcttctatcggtggtggttcaaaaaaagcgaattatgtatttacactcgcaacgacaaaagatgcgggagcagcggacaatacctcttatacgaaatataatattggttttgccttgaatatggttcctttggatggcttgaatgttagtacaattattaatgccgctaagatagaccgtgtcaggaatcggaattttagagacaggtttgctgagatggagtatatggttgatttttcaactccgcttgcacctgccggcaatttgtataatgactttttaatatccaatgatttgactaaagatgataattataacaatttactgaatggattgttggctttgagctatactaagcaaagattcaatgctacagccagcatcaaacttgattatacaacaaatgttcgtcgcgctttttggcctatggctttgttggagtccgtcaactttgtctctaactattcaggatacaatcaacggattataggtgaaacttcagcgagttatttgttgcctttagctgatattcataagttgaatattcagtggaatggctctataaccagcgatttgtatcactataattatactcgtgcctatgatggtgatgatgatatgaagccgacaacaagtaccgggaacttcaagcagtatcgttatgttgatcgtttggagaataggtgggtatcgacttcaatagctttagattataagtataagaacttgcttaatgtgggattattggcaagatacgacggaaattccgctatccagtcggatcacagatggatgtttacacccgctgcctctgctgaatggaatttaaagaatcaattttttacaggtagtactgcattgtctggattgtctttgcgtgcatcttatgcacgaatagccaaatcattccagtccgatagatatgaattaggtcctcaatacttggctacaagtatcacatggagtggcgaaccgttactttcctcagctaatggatttgcaacaatcactcgtccgtatgcatcgggttgggttggttatgatttaaagcttccctattctgataaaatggagcttgctttgaaaggttcttttttcgacaatcgcattattgcggaaataagtctgtataagaattatgaaaagaatttattgacatatttgcctgtcactcaagaaatgggatatgagtataaactggccagtggaatggatatcagtaatcagggattggaattaaatctttcggcatccattttgaagaacactccgttgaagtgggatttgtctttcaatgcaagttataataagaacaaactagagaaacttcccgaaaaccagaagacaactgtgataggcgaccataaactacaagtaggacagtcagttgatgccttttgggtgtatcaaaataaaggcatttatacaaacgactcagaagttcctgttatgaatgggaaaacactgaacgtaaatggagttccttttaaagcaggagatcctgtttggacagacgttgacggaaacaatcagattaacgacaatgaccgtgtgctgaccggacatgccattccaccctatacaggaggattgactaaccagtttgcttataaaagattcgatttcagcttcaatctcttctttgatttggggcatagtgctttaaatctgcgcgatcaacaacgttacgactttgcgactttggataatattcagtccttgcagtctgttaaagagattttcttttggcaaaacactaatcagcgtgacgattatcctatatacaatccgcaaagcagtgttcatccttaccgtgcagaacaggatttgttccttgaaaagctgtcatacctgaaactgagaaatataactgttggttacacacttcctataaagaaagtaggtagtaatatacctaaaagtttgtatttctatctgacaggatctaatctgttatctttcagtaatttttcagcaggtgatccggaattagtaaacttcaatggcacctatgacgggtattcgcttcccattcctcgctcagtttcacttggattgagatttaaattctaatttacgtttaattaaagaataagaatatgaaattatttgtaacagcattaatattattcagctgtatttcttctggttatgcgcaaataagtgatgaggaatttgattctgagattgataaattattaaaagtccgaactgaagacctttggcaaatgtatgagaaacataataataggcgtgtagaattagaaaaagagttatttgcaaagaagcagaaaaataatataacttccgatgaagaaaaagaactccgtaaaaagattgcagtagagaaagattctttggaaatgaggaataaaaagctggctgttattcgtcaacggtcggatagtttaagaattagatgggtgcgtggtgtgttgccgccaaaagaatcttctgcatttgtaaaacgtcttttagagataaatgaagaaggtgatcgccacaagttttttccagaatatatacgaactgtatggaagcaagattctatagcgggtatatctgaaaatgttcgatctagacgtattaaggcatttttgcaactttttcgagtgtatgaacaaaaaaatgtacaaaagcctaaacttattagaaaagttagtggcgggaagatagaattttaaatttaaaccaattgttagaatgatataaactcttttatttggtactgcacgaggtggtcataattttaccatgtctgcaaagatttatcgatatggaatacctaaaaggatagattaaaaaaataatacttatgaagaattatagtataataaaagtgaataatgtggctacattgcggttagctcttttctccgcacttgcctgtctatttctgcagtcctgcaatgactttctggatgtagatcccaaacatgcagcttcggaaacccaacaatggaagacccttgaagatactcgatcagcattgatgggagtatatggcttgacacgcgcagccttagccgataacaatactcattggatatgtggtgatttgcggaagggggattttacggtttataagcgtagtgacttacaagctgtgtctgataatgaattgaacaagccatacgacttgttgaagaaagtatctaactggagaagattttatgcggtaatcaatgcggcatctgtttttatggaaaaagctccacgaactgtcgaacttgaccggtcgtattctgaacaaaacttgaaatatgacattgctcaagtacgcgctttgagggcatttgcttatttttatatggtaagaatttggggagatgtgccgttagtcacctattcttatgataacggaacttttccgtctatgcctcgtacagacgctcaaacggtgctgagttatgctaaggcagaactgttgacagctataaaggatttaccctatcaatatggtactcaaacgaatttatattatggttcatatggggcccaatggcagggaaaactgttcaataagttatctgcatactctgtattagctcacatctgtgcttggcagggaaattatgcagaagccgagacatattctgcatttataatagatcatgcatctgagattaatgcaaaatatacttctattgccgacttgacttcagaaacagggctgttttattcgaatgcgagtgtaaaaggttcaaggattttaggatttaattttgctcacaatgataacgaagcaactcaaagcggacatcttgaacagttgactttagcttatccattggtacaaaaatcctatcctgaaatatacatttcaaaggacagcttattttcgatttttaccaattttgatgacttgcggtttggaatcatagataccatcaaatattcatcctattatgttcagaatttgaatgaagaaactccggtgttcagtaaaataaagattattcaggatggatcggcgaaagacaatgatttcggagtctttggctcgtcaattgttttcactcgccttgaagatatcaccttgctacgggctgaagcattatgcgcactaaatagaagcacagaagctgtatcctacctgaatatgatccgaacaaatcgtggattgagagaagtatcttttaaaaaggattttgggaataatcgcgaaagcttaattgccgagatatttgaagagcgtcgcagagagcttatgggagaaggctggaggtggtatgaccttgtccgtcggcaaaagctgatgaaagataatgaggcattcttgcgactaatcagcagtggtggaatctactggccggtatcggaagatatcattactgctaattcacagattgaacaaaatgagttttggaaataaaaagaaaacgacaatgaataagatactatttattttatgtctgacttcggcttccctttggatgctgtcttgtacagattacgaagtggcttcatatcctgaggaaaatgaaaccgaagtatttaatggaacggttctggattatttgtccacagggaatgaaaggctgaatttgaaatttgattctatgatggttcttgccaacaatattcccgatttcatacaacagatggaacagacggatgtgcaatatacagtttttgccataccggatgcatgtatccgttcctcattggcgcaacttaacgagtaccgtaaacaaaaggagttgggtgaagcgatttatttgagtgatttattaattgaaccgtttgttgttaaagatacgattgttaatgttataacaccgactttaaatgatacgatcattaacgaatatcattatgattatagagctgatcttgagcgaatgttatgcaagtacattattaaaggtagttacgataccgataatattctagccaatgaaggaaataactccttaaattctttgaagtacaattatcaaatgaatatagaatgttctcgcaaaccggcatccggatttgtaggcggaggagtcaaacagcttattttcagtgatatgaaaaactctcaggtaaaagataactggaacagagtttctacggtatggaatgatgtttatacaaataatggtatcattcatatcctttctccccaacacagtttcggttttgatgaatttatttacgtatttaataattatggcaatgaatataagaagtaaaaatattgcgctgctgttttcctgcgtattattaagcatatcgtgtgttgataaatatttgccggatagtttggatgctttcgacagagacgtcaattttactacaaaactatatcgtcctcaactaggaaaaaatactttgatgtccgacaacttttcatcgggtaattcaacgcttcctcttactttcgaaatatcacgaatcgtgagggccgacggaagtcctgcacctgaattgacggaatatttcccggtaaaagtttggaaaactccatatatgggtaccgaaaagtctatagaagaaatagaagctaaaagagaaatagaatatcgtactctttttcaggttaaaaagcattccggagaatttatgatgtggtctaatgccgaatcttcttttgtgcagtgtgctccgagtgatggctatatttttgatgtgctggtgaaaaactcgggaggatataaaacatttactgatatgcagcttatacctgtcagagaaagtgattacgaaccgagtatatacgatccggaaacagggttggtgcagggacaggactatgttacaccaaattcgttaaccctttttcaaacagaaagtggagactatatgtttcctgaagatgtacatatttattttcgtgagaaccaagataatgatgatgatgtaaaaagtttgacttttcgtttttatggaccggattatacaccgatctctccttcatcttttaatcagacagactgggctaatctgattcatggtttcaatatggagaaaacagatgaatatgtaaagtatgatgtagtttatccgatgccattggttgaaatgaaatcaaaatataccaataaagatggtaatagaataaatgtcaattttttatatgaccgtattacagcaagtggttatcgtatgacatccactatgtcatttgaatttgcgatatacaaggaagctcattgggagataatagttgtatttacagcaggagcccccttgtttgaagatggaaaataactaattaataccatgattctaatatgagaaatatatttaaatatggcttgttggctatggcgattgctgtcacctcggttggtgttcgggctcaggatattcctgtcagtggtgtagtcaaagataaaagcaataattctacattgccttatgcttctgttattgttaaaaatgaaagtggaaaaacggtgcctcagctttcaaccacaactgatgataacggacgattctctacaaaagttaagagtggttaccgacttgtattctctttcctggcgttcgacagtctttcagtcaaagttactaaaccttcagaacgcatgcaaatatatctgagtccgacagagaatatgcttgatgaaacagttgtagtcggatttaaaagagttagcaaggctgcggtaacagcatcggttacggttattaaagcagaagatctggtcaatactcctgttgctaatccgatggagttgcttcaagggcgtgttcccggattaaatattcagatgaataatggtactcccggaggtcttccaagtttttcaattcgaggagtctcggatatttccgttcaatcttccggtgatggcgagtttatgatggggctgactcctcctttgtttgtagttgacggtataccgcaggaagacgtaacgagctatgatgcagctggtttgctgtcaggtgcaacagtcagtccgttggctatgattccacttgaagatattgcgaatatccaagtattgaaagatgcagctgcaacttccctgtatggttcaaaaggtgcttacggagtaattcttatagaaactaaaagaggagaaacagccaaaccgaaagtttcttattcggctaactttgtagtgaaaacaccaccgaggttgagagatgtacttgcaggcggggcggagagagcgctcagaattatgcaaattttgggaaatgatacatccgcctatcatggatataatgaaatccataaattgcaggcactgtcagatagcttgaatccttattacaataataatacggattggcagggtgttttttatcagacgacttacaatcaaactcataatcttagtttctctggtaaacctaatgagaaatttgactataagatcaatgcaaactattatacggaaaaaggaattgtgaaaaacacggactttaaccgatacggtatcagggcagcagtaggatataagcctaatgatagatttcatttggatctaaatcttgccactacattaacccgaaatagtaatggtagcggaaatgctttctcacaatccggcgtagccgcaggttcggcagcttcttccttgttgcctccaccgtctatgtatacagcttccaattctgcattgtctgttttttctgtccaggcagataatcagaatgtagtctatgatgcaagtatgaatatcatgtatctgttgccatttgatataagatggagaagtactttaggatataaatacggaactgtggagaatgagaaatttacgccgggtattttgaatgccaatagggctacttggaataacggtagtgaatatagttataatatgtatgttcgttcattgttgtcaagaaccgtaaaattgggaattgtaaattttgatttacagggaggttttgaactttcatccgaaaagtatagcggtaactttattatgctgaatggattggcaagtgaccatatatggtcgtccggtatgccgtccatggcagctggaaagtcgaatttttcagataaaaagaatacgtttgcacttattatagatcctcagttatcgctgcctggtgggaaatacgtatttactcccaatattcgtcctgaaataaattcatcttatgggtcgcaggcgaaatgggcaataaatccttcattaggatttcgctggaacttcagccgtgaatcttttgctaaaaaatggaagtttctggatgccggagcttttcgtgtaacttggggacgtagtaccacttataaagctagtatttatgatatatggggaagttacaatctgagcaaagatacttataatggagtttctattattcctattgataaaaacgctatgccgaatccggatttgaagccggtaacatcaacatcatggaatctcggaacagacttatcattccttaataataaaattatgttcgttgccgaggcgtattacaaacaaattgacaatcagctaagttcgatagagttggctaaccacaatgcttttaattccgtaagaagtacgaaaacgagtctggttaactatggattggagttttcgttgaacgtccgtccgttgtcaaggcaaagtaattgggatttgaatgtggcgacttcactggcaattaataaagacgtgatcgcaaagctgcctaacgaggtgcggcagattattaacagtgatgcggaagtggtgaataaattaggttctaacgcgatggggaattatctctatgtgtataaaggcgtatatgcgactgacgaagacgtgcctgttaatccgctgaccggagaacgcttgcggatgggagggaatacttctactcaagcatactttaaggcgggagaccctatttgggtggatgtaaatggtgattatatcatcgatgaaaaagacaaagtgattgtaggtaattcacagccgcgaatgaccggtggtattagtatcaatcttcgttataaagcgttttctatcaacactaactgctcgtttacgttgagacgtgatattatcaacaaggctctggcagaccgttttagggcttatggaacacctgtagcaggtaaggtgaaccttacaggtagtggagctttaacacctattgaggcatataatttctggacagaagataatatctatgcccaatatcctaatccgtttgattatacccgttcaagtattattcagcctttcagatacgaccagacattgtttatggaagatggctcttattttaaaattaacggtatatctgtggcttatactattccaaagaaaatgctggatttttttaggatcagccgatgtcagcttaattttagtatgaacaatatttatactttctccaaatattcaggcatcaatcccgaaaatgtaaacaatttgggatatgacacatccggtggttatcccaatggtcgtactgtgacatttggtgtctcaatggatttttagatgaacgattaaatatagaagaatatgaaaaatatagttttaataatgactttgatagtatcttgcctgtttgccggttgtgactcgcttgcaaataagagtgaagataaattatcgggtgatgatttttgggcgcagggaaatgagacgaatgcggaagcttttttgttgagcatatacaattcgtttcggaatgcaacaatgtcacaacgtcctttccttacgtatagcggagatatgcggtgcgctccaataacagcctacagcactggggataaatatgtagcttatttagctaacaacgatatgggtgaattgcgtaatacatatcccgatgatgctaggggcggtttaataatgcaatgggatgtgttttatactgctattcaggatgccaatattctgcttgctgaaatagacaaagtgcccggcatggatgaattgaaacggagtcgttttaaggcagaagctattttcatgcgtaacttgtcttatttcttcatcgtaagggcttttggagatgtgccttattatacaaatgcctataatgaagctcccttgccaagaaccaatatggttatagttttgcaaaattgccttgctgacttacaacctttgcttgacgatgatccgggagcggaagtactaccatggtcatattcatcttattcgagcaaagggattagagcctccagaggttctgtcattgcgctgatgatgcatataaacttgtggcttgtacagtttgatgcacaaaataaagagcaatattataggaatgttgtttcgctaggcgaggaactggaacgtaacaatggagcttattcattacttgatataaatagaagttccgtgattttcgcaggagggtcagacgaaggcttgtttgagattgcacaaaatataaatttcaatgagatatttatgatgaatgcaaagttttctgataatgtttcctattcctgtctgaacaagtctacaccagtgttctgttattcaggagattatctaatgagtctgttccctatgtatgaagatgatgcgagaaaagaattatggtttgacgaaaagatatattctacttcggtttcaagttctgctcctaaggaaatcaagaaattttggaatattgatacttatggaaacggaacaattacgtccaactccggcaatcaaatagtattccgttatgcaggtgcacttttgttgtatgctgaagctcttgccgctttggggactaacgatacgaaagcctgcgaattactcaaccgggtccgcaatagggcacatgcttccgaaataaatacctcgggtagtgaactgatggatgctattttctgggaacgctgcagagagctaatcggtgaaggacattactattatgatttggttcgtacaggaaaagtgtataacagaaactattgtatgaatccgatgacgcgtactaatttcaatgtgggggcatggacatggcctattcatcgtaatgcgttgaaaaacaacacacagattggattgaatttattttgggagtaactctgataaacttaaaatgtatagatatgaaaaataatatcaaattatggaagaaaattgtcggatgttgccttttggcagtactcatgtacaattgtgccgatgatagttatttaattgatggtggaaaagcaaacccttattataatgggaatatgatgcaatatttggaatcaagacccgattattttaaagatttggtggaagtcatccggctgtccggtatggaagatgtttttgaagacgaacaaattaccttttttgcacctaccgattggtcaatccgtggtagttttaattatctgaaccgtatttggtatcgtatggggcatgatagcatcaagagttttagtcagataaaaccggaagtctggcgtgaaatgctgtcaatgtacattgtaaaagataaatatttgctgaaagatatacctcaaattgatacgactgccatagcagcctatccgggacaggcatttttatcttatggtcagcagcctatgaatatgggtgttgtttattatgatgcaaacaatgtaaaatatgccggtgcaagacaaatcatatactcttatgtctatgatttcactataggagatatgaaaaacgcttatgtggcaacatctgatatacaaccgaccaacggagtggtacatgtactcagattaaccgatcatgcatttggttttgaaccatatcttttcgctaccaaagctataaatgcgacaatagaaacagaaccggataattaactataaataaagatagtacaatgaaacatattaccatctattcgttaatgattgtttgctccgtattcacttcgttattggtaacatcctgtaacagtgatctgaacagcaatattaaagatgatccgtacagtggtggaaaagctccgcttggaatcggtttgctggctgaatctccttctccggaaagcgcttatcccaatgatacggttgtattcaaagcaaaagggatgttgaactggtgtgatccgcaatcaggacgttacgatttcaagttctatatttctgatgaagaaactaaaattgtaactgctaccgacacgacaatcaccgtgaaagtacctggaaatcttagttcgggtacggcttatattgtattgaaagaacaggttttctatggacctcgtctcactgtattaggaaatattaagatagatcagtcatacggctttaaaggcacttcggggcctatttacgattgtgcggaacattattcaaaagcacgggtatattatccagttggcgactatatgcaggcctactacaatgaaaatagctcgcagagtttttcttgtatatctatggttttgacagacggctctgtatcgggaaaatgggtaactgacttcaaacttgatcctggtcagggagccggcattgatctggccaatccgggagtgacagatattgaatgttaccttaattcatttagttattttcctagtgaccacagggttcttctgtcgggtaaattttcagaatacggctgggataagttgccggtcaataacatcacgatagctactaatgaagtagcctcgtattataaaactgtagcgctgccttcgaaaaagaataatacaagcataaattgtaagataccggtattcaacgggggaacccttgaagcgcctgtccgtacatttataacttccaatgagaaggtggtagcagtaggaaatattacaaactactgtcgtattaataccgaaaaatcctatgctgagagtatggttttggattattcgaaggttgcaagtgtattgcgtatgtcaaggactggagaacttgatgatagctatcgcagggatgcagaaggagttatcgggcagattttagatgcttgtatggtcgaaagtgacggtattgtcatagtagggacattcagcagtttcgatggacagtctgtgaagaatattgtgaagttgaatgccgaaggtacccttgatgaaacttttatgaaaaacatcggtacgggcgcaaatggaagtattactaaaatccggtacaataaaaacaaaaagaaaatccttataactggggagttttctgagttcaacggtattcctgcacagagtgtagttatgttgaatgatgatggcacacgtgatgaaattttcaagatcggaaaaatggaaggaggattggcaaattttgcctgtctgcttgataatgataatattgttgtttcaggtgcgtttacgaaatacgatggtgtaactcgccgtggtttccttatattgggtcgtgatggaaaggcgctgcaacaatttaatgtaccgggcatcttccagggtgaactctacaaagtaattgaaactcgtacttcgaccaattcaaacggattgctgctgcttggtgatttcagtcgttttgatggtaatatggttcgcaatgcgataatgatagaagttgattatgaataacttattatgaaatacaatggaaaagttgataaaaaatataatgctttgcctgtttgctgtatttgcattctcgtgcaatgaggatatggaaaggcttttgactgatgattatccggagtcgggtactgaatatactacgggacacgtattgatggtggttatcgatggtgcatccggaatagccgttaatgaggcgtataatacacgaaaggctccagttatccgctccatgacggataaatctttgtttactttttacggacttgccgacaatgaagaaggggtaagtaaagaacgtggatgggcaaatttgctgactggaacaacaaagaacgggcttgatgtcaatcaaggaattgacgaactcgaaacgccttcttttcttcaacgattgaaagaggcggatgaaaatctaaaagttagcttttattcttccgatacggagtttttcggagctttcgggagtgttgccgatactaaaagaaagacttcggccgacagtgaaaccgctgatgctcttattgctgaaatcaatgatgaaacaatctcggatatcgtagttgcacagttcggcggtgttcaacagactggtgagcaacatggattctggagcaatgagacaactcctaccagtgaggttattgatgcgatttacaatgtagatgctttcatcggtaaaataatgaaagcacttgaagcgcgtccgcgttacgttcaggaaaactggcttgtagttattacatcttcttatggtggtgtttatgaaggtgatgtaactccggcatcgttgtatgatgatccgcgtctcaattctttcatgatgctctataacagtcggtttgcatccaaattgttgcaaaggccgggctcggatgaactacaatacaaattctatagtccttatttcgtcggtcccggacaaaaagcgacaacaaatgccgttatgactggaaataccgagttctttaatatgggtaaacgatggagttccaatccggatgaagaggtggataaaagtggatataccattcagtttaaaatgtttgataagcacggcgatccctggggtaatagaaatataatatcgaaaagatatcaaaaagcaggtacaggctggcagctaatgttttctaataatactcaagtcgaatttgctgcaaattttaaagagggttcttcggttttccgcttaccatctacgagacgtgacggatcatggcattcttatacgctagttataaaagaggttgatgatacccagaaaggtgactccatcttattttatcttgacggtaagtatcagatgggatgtaagatagacggcagtaaagatatgtggacagatgcgcctcttgccatcggacatacgttttctccggacagacctaatcaggcaaatctatatataaacgatctccagttttacaacgttgctctacctgctgatattattgcggagtatcattgtactacaaaactggaccttttgggtgaattatatccgtattggaataatctggtgggttattaccccaacgatcgcgaagatgatatcggattatcttatttggaagattattcgaaatatacatcaaaagataaaagattatacttcaataaaccggttggtacgtttgcgcctaccgatgattacgtaacgcgcaggcaggagagtattgtaacggataaggtatgcccacttatagacgattcctactataaaacggttcttaatacagtcgatttatcctatcagatttttcaatggtttggagagccggttgattcttcctggaatttcgatggtgaaggctgggcattagattacgtttctttaaataattaaattagaatgcaatatgaaatgctttaataaactaaaagccgattatgcagttttgctgtcattcatttcctgtatgttttttatgggaagctgcaacattgcttatcaatatgatatcgaaagcgggacagaagatgataccgctgattctaccaatgtaaccatagtaacaggtgaaggaatcgatgtcagtatgtatgaaagtgcccgtgtttttccgggtttggtagatactttagtcgataatactgtcaatacactgcttgcgcttgatttaagcaagagatacattcctgcatacgatcttgacgtgcaacaagttcctcgtccgatatacagtaccggactttatgccggagcaggtgaattgattactataaccattaatgacaacactatgggcttgacggttatcatcggttctcatttagatgatttgacggatatttctccctacttgcgtttgccggtagttactacttcgaagcaactgttcccgggaaaaaacaccattcgtaatcctttgggaggcatgatatggatcgaaaaaagcaaggatgtgaatggcagtgcggattttgttatggagattaacggggcttatcgttcgcctgattttattgtcggttctactgatgtaacagcatgggttgagcagttgcgtacaacgactgtaccgtggctcgagttgcgtggccggcatgtcactttttccgttcagcgtgagcgattattggatatgataaatgatgatccttctatagctgaaaagatgccgaacacactggaagcatgggacaatgctgtcgagacctattattataactattacagtttgcaggttggggcacaggatttttcaatgcgtgctcccgattttcctgaacgtgtggtgctggatgtggagttgttggacaatctgtatattcgtaatgccgattatggtgtagtagcattgaatacaaattatctgttgaatgagctggctagctatcaaacgttgaaatccggtaattctgttgctatttttaatgcgttatatagaaattactcttttagggatataaaatcaccatggtggagcgaagtatctgatgcggtgaaagcaatcccattatatcgcatggctgagagaggattgagagaggatgggtatccgatgggaccgattttcccggaagaaggcagtagcattgcggagcaattccccaaagcattggcatatgcagataccgatagtagccgctggtttgtatctgatataaagtcggaagtacggccgacatacgcattggcaagcctcgttcaattagctaactacaaagatgacgattgggctttttatatagagttgaaccgtatgattaaagataaaatttccatagatcattctacttctacctatttctttaaggctttatgtgactattttaaggaagatttttcaccattctttgagcattggggctattcgctgacagacgaagcccgtagttatgcatcgaaatatccgctgatggataaagccatatggaaatactcgcctctggcagaaaatccatcaagtggtgtggttgatttcccaagtaacgggtatcactaccgtcataatcgagctgactgggagatttatgcactggatgcaaatggaagcgataactttaattcagggcagtcgccggaccgattgctggacagcgacaaatcaacaggatggacttcatattacaacaacgatacaagtactccgccacttccgtattatttgtttattgatatgaaagagacgacagatgttaatggtgtatttctggctggcaacaactcagactttgcggcaattaagctgattatcgagactcctgtcaatcaggatattattaatgatccgcttgacgaaaatatagtttggagggaaattgtgcagattgattccattgcacatcccgagttgcccaatattaaaagtgagagtttctatgattttccgtcaaaagaacaagtgagatatctgcgtataaaacttcctgaacctaatcgtaatgataactggaatgaaacagatatgtctcgttttaggttcagagtacagtcgtttaccgagtttggtacattttattataaaccgtaaatttatatcagatgaataaactattaaatattctcacatacagcttgcttgttgtttgtgtcctggcatttaactatgcttgcacggaatacgatacacctgctgaaatagcagacgatggaactatagataccggcatatctaccaaaatccatcgtaaagtattatggataaatatagatggtgcggttggtgaagtggtgaagaactcccttcctgccgatggtgccattgctaagatgttgaaaaatagtaaatattcgtggacaggagttagtgacaatcgaaccctgtctgtcgagaggaacgaagaccctgtaacgtgggcaaccatgctcactggggtcatacccgaaaagcacagtataaccgatgaatcttatactgctaatgtggagtacaatccgaacaatccgaatgaaaaggtaattcactatcaaaacattattagctatatttcgaataatgacgtgaatatgctttcattgtgtgtgacaccttgggcgaaactgaacaaaaatatgcttaacaatgctaagactaccattacttcagaaaatgacgttcaaactcgggatgtggttctcaatcatattgcgaatgaagattacacattcattctggccgatttttcaggaatgttggaggctgggaagagtgggggattcaaagcggacaacgctgcttatgtcagtgcacttgaagctatagacggatacattggtgaatttttgtcggcgattgatgcccgtgagaatgcattttacgaagactggcttattgttgtaacttccaatcacggtggatcggctgacggtcgttatggtggcacttcggaagtggagcgtaacacgtttggtctgttttactacaatcattatacggaaaaacaattgaatggtaatagactatacggtgcatattttgattctcagaatgaatacaaggctgtcgtttttgatagtataggtaaatattattctttaggtatggatgcattttcaatggagatcataatgcgtatggttcctaggcaggacggtacatataatggtaacaattgggatcgcatacttggaaaagccggctggggactatataggcagagaggaactgtatccatgagaacaaatcctaaggaaggtcctgctcttgagcaagctattaccggatacaatgattctaaatggcatcactatggtgttagcataagttccgctgcctccggaaggagaaattggctcattactttagatggtaagttgcagggatctggaactacggatacccaaggattggctccggattcaagccttttggcgataggtggttattctgtgccaacttcctattatatatcggaagtacgtctatggaaaaaggatcttgctgaaagagaatttttgcaactatcgggagaaattgatattgaaccttctagtgatatgctcggctattggaaattcaagccaacagagcaacttgagaaattagaggaggatacattagtaattaaaaatcagatacaaggtggactcaatatgtattatattaaagataaaacaagcagttctccgattatcgaacagaaagcttctgccatgtttgcaaatacattgcctaccaatgtcaatgctgaaagaatctgtgttgagaatacgctgatagtaccgcaaattctctattggttaggcatctcggtgccatccacattagatggatacgtgtttatcaataactatgcgctttcagaagaatggcgcgaagaggtggatacggaataatttgacgaaaaaagaaaactttgtttgatgctggaattaatggaggagtatcgattaaatatttatgtcggtactcttctcactcaattaataaagttgtaattatagttttttatcaatcataaaagacatctgtaagaaatattatgaaaacaattaaattatcaatcctatttcttgtccagatactattactttcatgtagcgaacaagtgtatgttgatggcacttccaagcaagttataaaaagagataagatgattactcaggctatcagtcaacttacacctcaaaacaaactgcttgtagaggagattaataaaaatgttcaggataccatacttgaacgattaaacatgaatattgcagggagatggaatgattcatccttgtccttaactttgatgaagtccactataaagtttgtaccggttattgattcgccttcaagattatatttagtgaacgattcagaaaaggtatttagaattccagaaaagtttgcttgtttttatgggcagaatgataatggggaaacaatatatttttatgctatatatcatgctgaaaactttatgaaagacacgaatccgaaaagttattatcaaggatatgttgaagtgtttgggaaggaagctgcggacaagatggtagaaagtagtataaagaggacagaagcggaaagatgggaaattatgtcgtttacaccgcagaaaaatgaaacaaagaagtttgaatatgctagagagcattctgatgatgggacattttttattttaactcgagaaaatacttatcctcatatatgtttctttaaggataaaaagccttattattgttggggagcaaatcaagatgaattgtctatggaacctttggaaaattatttgaaaccatagttaatacggaatagttctgtataatttatcagcccttcaccttctctctacatcccttatcaaatggggaagagcgggtgaagggcttcctgtttcatggctctttcatcgttctttatattttaaatccaccgacaccctgtaattacccggaaccggagtatatatcggttgatagatcgtccctttattttgcaatttcttttctgccattaacctcttgatatggcgatatgcagtgatttgcgtcattccgcagagatattgaaaatctttccgggtgataatctgattttcagcaaaatattcagtcagtttcatgtctatttctacttctgataaattggcggagtgcggtctgattttggaacgctggaatttcatgtgacacaattcccctttcaattctttatcagctttaaactttatagctttcaattttacccggtgcacacgtttgtctttcgggttacgtatttcttcttcgcaggaaagagtgacctgaaagaatcctaatccatcgacatgcacctttttaccttccaggaggcactgagctacttcatttttcagttcctccaaggttgaaataatgtccgatactcttaatgtggagcgatcatggatgcgataagccagtttctcggtattgacggtctcaaaacttaccggacgggcatgataacgcgtcttgttctttttctcctttggcatcggagtcttatataattcaaattgtactgccatttctgctttatctttaaatgatttcttgtttttagtgctgatattttatacttatcattactatgataagatcttatcacaataatgatgttactttatcatagtagtgataatatcttatcacattggtgataaatataatttgtcggtgacaaagataaggtttaatagtatgataaacaagaaatgataggatattaatgataagtctggttttcataaaatgaataggataaaaagttgcaaatggcttttttttgatattatattcgcatccattaatcataaaaaaaagaagaaaatggaacaaaaaaatggttggtttgccttttggcaaaaattgatgaagtgtctttcaaaacaagatgaaacgggagtaggggatacaaaaagtgtagcacctgtcaatactattattcagtcgattaagggggtatcatcgtctaaagaaaaagactcatcgaaagtgaagtcactaactgagagcgtagatacttttttaaaatcccgctatgatttccgctacaatgtgctgacagaagaaacggaatatcgtttgttggaacgaatggaggaaggatttgcacctgtgagtcagcgtgtcttaaatacattctgcctggaagctcacgaatcaggtatttcttgttgggatcgtgatctttcacgctgtattttctccacccgtattgcagagtatcatcctttcaaactttatttggaagaattgccggtatgggatggagtggatcgcttggcggctttggcacgcagagtttcgagagaccaattgtgggtgaaagaattccatatatggatgcggggtatgacagcacaatggatgggggttacgggaagtcatgccaatagtgtggcgcctttgcttatcagtacggagcaaggatatttaaagtctactttttgcaaatcgctacttcctcctgcgcttcagcgttattatatggataaggtggatttaaccagtcaagggcatatagaacagagattggcggagatgggacttctcaatctggatgagtttgataaatatgctccgacgaaaatgccgttattgaagaatctgatgcagatggcttcattaagcctgtgcaaagcttatcagaaaaattatcgctcgctacctcgtatagcatcttttatcgggacatcgaatcgaaaagatttattgactgacccgactggtagccgcaggtttatttgtgtgctggtagagtatcctatcgattgtgaggggattgactatgcacaactttatgctcaattgaaagcggagattttggcgggtgaacattattggtttacaaaagaggaagagacggaattgcagcaaagtaacatgacgttctatcgtcagggacctgtggaagacgtattgcgttcctgttatcgggcggcagaaaaaggagaagggtgtgaacttctttcgtctgctgatatctttcagcgattgaagaagataaatccggcagctatgcgtggggcaaatccggcgagtttggcacaaatactgatagcagtggggatagaacgtaagcataccaagtttgggaatgtgtatcgggtagtctccgtctgatgggaggtgaagcggatggtgaataggagaccttcacccgcaatcgtcgtgccagagggagttgtgaagggtgaagggaggaaaaaggaggaatgaaaattgtatcctttttggggacactctttccttctctttttcgttttttcttcttatcttgcagactataattagaatagagaggtttgataatagaaaacgtgaaattgaagtagcacaccataaattctcatttatcagagattttttctgatagataaaacttgaatataaataatgagtaaagaatctaaaactgggaaggtaacctgtcgtatactaaaagaaatcaggcagcagatagctaatgcaaatgatataaagtttgttacctctaaatgtcgatatcaaggagattgtttggggacgtgtccgaagtgtgaggctgaaattcattatttggaacagcaacttctctcacgtcggatggcagggctgaatgtaaaggtgataggtgtttctttgggattatcagcactgttttccagtcctttgtatggacaagaaacggtaaaagatagtttaaaggatacttctaatatacttccacaagtagaagtgattggttataaaagtgtgacgaaagtgacagtttgcggtggactatctattgttgaagcagaggaaaaacatgtggtaaaaggtattgttgtagataaatgtggcaatccattgatcggtgcagtcgtaacagagagaggtatgaataatagtacgaccactgatcgtgaggggtattttttacttcgggtccgaaagggaaggtcagtattggaagtgagttctgaaggtatgaaaacaaagaagataaaagtgagaaaaaagaaggcaacgaagataaaagttgttttgcgtaaggataaacacagctacaagcaaacgatgaatgctaatctgtagttgaatgggtattgatgtaacgttttaaagtagagaataatcttaaaatagaaaattgttctactatgttattgttttttactttagtttatttatttaaaatgtgtgcttgctaatttttttatgaagccgtaggatgaatttggaatttgattttaaaaataaagaccatcttttgttaaacatctaaaatgtagaattatgagaaaattattgcttggggctattacaattctgattctcgcttgtagtgagaataaagaaaatgaagggatgcaatctgcatcatctgcaataaaaacacgttctgggacgtggattcttgaacaagtaaaggatacttatgtttttggtgagcaattacagctccaatgttccggtgaaggatattctggtaagatacatagtgctgtgttagaaatgaaaactgatacaaacgagaagtatttagctatttcatcgggatcttgcgctgatcttgattttaataatgtttatgcttttaaattgggtaagtgttatattaaagtaacaatatttgtacttacagatacaggtggaggagaacaggactttgtagaagaggaaactaatgttcttgaatttagagtgaagggaccttcaattagcaatataatgaaaatgagtgaagttacccaacggatggatgagtgttggaaaaattcaatatcatctgagaaatctcactccagaagagaatttggatttactctacagatgcatacttacagtaatgcagccccaaaatactctttcatagatggatcggccatgtcttcaaatgattgttcaacaggaggtataaatacgataacttttactattagaactaatgaatataacgagtctgcttcgtatagtgtagccttgtttcatacgcatccacctttaacaaattgtccaagtacatcttcccggatcactggaccttctagtcttgatgatgatacagctaatacaaataagattccatctgtaatattcgattatggtgacaggaatgaacaaatatatggaggacatagctctaatttaccatatgtaatttcttatgccggaagctacgaccaaagactatgataaaataaccaattaaacaattatattatgaaaacaacaattcaaaacttagcagtactaattctactaatatctactatgaatgtttactcccaagagtatggctctcatggaattagagaggatagtagtcgtccaattgcaggtcttactatccaagagattcggaatgcagtttatggagtaccggcttatcaggaggggaaaacagtactatcggttagtaatattccagtgatgagagattctatggaaatgaaaaaaatagcaacaacccctatgttgtatattgactcgcttatttatgaacatatattagatgcgcctcttttagattttcaagaattgcttctgaaaagatttccatttttaattatgcaacgtatgagaccaaccgaaaaaattatgaaaattatggattctctagcattaaagaagccagacattactacagaagaatattggcgtatattgaagagagattacgctgatgtaatcaaggacaattttaagatgtatgattcgaaacaatttatcttttatccattccgtaaagtagggaatattagagcttttagaatgttatttcatggtctttcttattttcccatggaaaaggccattgatataaatgccaggccgtatttggaaaagttaaaagcattaccacccgattcgttgtattttgttaagccacagcattacattattacaacccaataaaaactacttgcaaatgtgttgtgtctgccgtatcgtataagctattaatattcgatgcggcagaaaaaaaaatagttggaaattttaggtaatggattatttttaaacctattgagcgatttttgaactctttattctgtatcattttaaggaattggagtattttgaatgatttgagtactcatttcttttctatttttatcaactttgccactgtgaatcattcgatgatttgcggtggcttttaaattttaataaataatagaatcgacatgaattgcacaaagatgaaaaaactttttagaaaaggtacgttgagtatacttcttttaggagtaataacgtttttcacttatccgctctcggcacaaacgaatggaaaatccagtaagggattgtacgagctgtttagtactaaaataccggacggggcgcagtggaaagctcaggataataaatttgtccgtgatgggggatactctaaaaaatcagaaaattatatatatgtaggagcctctaaaagtccggcagagttgaccgggctatccattcctattcgcgagaatccgggaccgggtgagtttcgctatatcacttttgcctgggtaaaatggggaggtgatcaaattggaatgaaatttcatgtttccgaaaagtctgcaaatcaaaaaggcaagaaatatgattttacttatatagccggcaagtccaaggatttgataaatccgatggagggtcttaatctcggtgaactaccgggacactggatggtgatgaccagggacttatggaaagattttggtaatattacgttgaccggtatttcttttatctgcccggagagacgtgatgcaggatttgatgaaatctttctcgctaagacacaggatgatataaagaatgctccgaaagtacttccgagcgaaattgcaactccggtacccgttgatggagaagaggaagggctggtatatgaagagggaacaactaatgaggatgaacaaccgcaaggggtacagattgactgggctgcacagattaaagcgggaggattcatgatgtatccgttgtatttgcttggattgcttgccttagtaatagctttgcaacgcttgctaacttcaagagaaggaagactggcaccaaaaggactacgtaaaacagtcagcgaatgccttgcacaaggagatttgaaaggtgcgattgcagcctgtgataaatacccttccacattaggaaattcgctgcgttttattttcgagcatgtgaaagctggaagagaagctgtcagccagacagctggtgatatggccgcacgtgatatccgtacacatttgtcacgcatatatcctttgtcagtcatagcttccctgtcgccccttatcggtttgctgggaacagttgtcggtatgatcgaagcgtttggtctggtagcattgtatggtgacgaaggcggcgcttctatattgtccgattctatttcaaaagctttgattacgactgctgccggtttgatcatcgcagctcctgccattgctttgtatttcattattaaaaatcgtattatgaaattggcttctttggtagaagtagaagttgaaaatgtgattactactctctatctggaaggagattcgacggatatgaacacaccggggagtaaggaggagaagcatgagactaaactatgatgaagaagacaaagtagaggtgcagatgtcgcccttgatagactgcgtctttctgctactgatcttcttccttgtgactactatgatgaagaagtgggaaatgcaaatacctttatcacttccttcaatgacttccagcttgtctaccacccgcgccggagaggaagctgttatcatagcagtggatgaggagaaaaatgtgtatcaggtagtaggacatgatgcgtacactggtgagaaccactatgtgccgatttctgatctgaatactttccttacagaactccgcaacagtgaaggtacggaaattgctattgatgtggcggcttaccggactgtacccgtaaatacggtaatagagatattcgatcaatgtcaaatacaaggattcacgcgtacgcgtgtccgtttgggtagtaaaccttattaagcttatgagattatcactatttaataatgaagatgaaccggaagtgtctatgtcgcccttgatcgactgtgtgtttctgctattgatcttctttcttgtctctacaatgacgaaggtgaaaaacagggatatttcagtggatctgccgacttcggaatcagccataaaactgaaaccggatgataaacaggctattgtaggactggatgctgaaggtaacttctattgggacggacaaccttgttcgaccaatttcatgatggaacaattgcgggagacctgtatctctgatccgggtcggcgtatccgcattgatatggataaaaacactccattcggacgttttgtggaagtaatggatgcttgtcagttttataatttaacgaatataggaatacgaacatatgacgaaaactacaacagggagtagccgtctgacggttatcctatcatgggttattgcactggtctgtctggtaggaggagcggtgtttatctggctgatgccatcaccaggacagggagctattgacttgcaagcgaaaaaacagaaatctccgaaaagtatcagtgataaaataaagcaggagcaggctcagcgggagcttcccgctaattattctgagcaattagtgaagcagtcggaagtattggtcaagaaaaatttggaagatcagcttcgtaaatttcaggaaatggctaagaagatgaggcagcggaaaaatgaattgttgactaaagtagagcaaagaaagttaccacgtacggcaccggatgatgctaatgatacttcgaaagcaaggaatattccgcaggcgggcaagttatctgcgaatccgtcggtagaagatatgtatgctcttttaagagaatatgaggctgaaatacagcagaaccatttggctgccaatgcagctaaacaggcgctttccaagggactttcgtttcccgaggtttatagttctctgaagacaggttcttcccgtatgccaagttttgaagaactgattcgaatgcagactaaaggaggggaatgggctacttcagcgggaagtaatgccagcgcaggtctggaaataaaaagtacggcagacttgaacaactaccgtggtctgttgggacaagcgacccgacaagccggacttgctcaatctcggttggaaaatctctttggagtagtgaagcaggtcggaaagcccggtggcggctttggaattggcaatggtcagccgggcggaggtgaaggcagtggcaatgggaacggtttcggtggcatgggggaggcagctcagggcagtggaaacagacgtccgatgaatgcttatgcaggtccccggcttaatcaggaaatggtaaaagctcaggcattgcccggacggcgtttctcaaaaagcgcggatcgtaaagggtggttatatattaacacatggtatatgataggaccgtgggaaagttttgggcgagaggacttttcaattgtccatccgcctgagatatctgtggactttgatgcggtatatactgacggacaagtaggtacaggggtgatggaaacggattctcatccgataaaggtcataggggaagaagtgtatttggatggtacgctgcgatggaagtttatgcaaagtgaatcaatgcataatacggttcctgtcactaccggacattctacttattatgcttatacggaactttattttgatgaggctactactatgttggttgccatcggtacggatgatagtggccgggtatggataaatggtaaggatgtatggcgcgattatggtaccagttggtataatattgacgaacatattactcctttccagttccgtcaagggtggaaccgtattcttgtgcgattggaaaatggcggaggaggagcgtgtggtttcagtttcttaattattccacaagagtaagatgacacacgttggccggcttatagaaattgaactacatcgacaaggattgtctgtcacttggtttgcagaacagctttgttgtgcgcggaccaatgtgtataaaatcttcgggaagtcaagtattgataccgaactccttttgagaatctctgatatcttgcaatatgacttttttcaatgttactcagcatgtttaaagaacaaaaaggaaatgatgtagttgtggatacatcatttcctcctcttttataattttagttttgtaccgattgtcgttttcttttttgtccgaaggtattgaaccgataggcaatatatgccataaaatatacgttagatgtactggattctctgtcggtgatagaattctcggaaatggaacgttccgaactttcattctcacggaggatatcatataggtgaaatcggacggttgcctttttcttcttgaggaagcttttcgatatttgtgcgttccatagggtgcggttagtatcatttttaccgccatatcctctttttaatctacaattgatattggatgagatttttatatcccaaggtaagtttaagtttgcttcagttccgaatgtataatcaaatgtttcccgtcggttctcttttttgatagaatgttctgattttcgatatctgacttctgcagataactcaaagtcaatcaggtcgctacggtagcttccttttaaacgttctgataaaaagaggttagttgtattacttttaactgcatctgactctttgttgagcacagtgaaaccgacagagttgccgtaatttgtattggtgtgtgtatttactgtgaattttttgttggataatggagtactgaaggtaagcgaaccgtttattcgccagttcccgttcacattagtcggttgggtagtctgtcctccggtattttcgtcatatgtgacaatacgtgttgtactattcattgtattattataggagaggttagcattcaaactacgggatgtttcagtaaagtaagtattaaatgtagctgatatgttgttattgaatgatggtttaagttcggggttagctagccgtatgtttaaaggatcagaaatatctttttttctatataagtcggtcataccgggttgtgccgttctcccacgatagtttatttttaaggttgtttgtttagagaaggtatacttaaagtttatggtgggggagtagtttattgcatttctggataaatactcaaaggtcgtgtcccgcatatagcttttatttgtcgttttttgtgcctcaacttctatacctatattataaaaatagttggtgcggatagtacggaaaaatatgccggtttggtgggtggaatatttatttttgtagcaatcactgtgcgctgtgtcaggatattgactgtatgtatcttcttgtttatcccagtcataggcatatttttcagagagtgaggaacggtgttgatagctataattaatttcgataaaccgattggtaaatacaggttccatatatgttatctgaacttgatatttattgttttcgtcaagtttttcaatccattggtttaaagtttttatactatcaccatacttcaagtaataagtattcaaaagactataccgatcggaattgccgtcatccagatcgtaataaagacgtaaggcgatgtttcttcctttgctgtttaatttgcggtttaactgcaaagagccattggtggagaatctgtcattcgtttggtggtttgtggcttctttccggttgataggagttgactcgttgttgagcgtttctgagaagttgcctgaattggagtttcctttggaaaaattaaatgtcggtcgatacataatagtggtgaggctgtctaatttccattcgaaacgaaaattagcggaaatagcacttgtctttccatcggattggttgttctgcagggaaaactgagaagtgttgtctgacaaaaaagattctgtatgacgcttgctccatgaatcgcgtttattttcccggacttcaatactacctccatatttgagtttctgagtattctgagaatagttggcacctattctttgattggaattaattccattgtcgttggcggtaccattgattgataagttcattttgtttttgaaacgattggccattccttttgccctataatggtcgtcatttccatatcctgcttcaaagttaccattccatccttttctcatacttggttttacgcgtaagtcgagtaccatttcttctttaccgtcatctactccggtaatacgtgccatgtctgatttcttttggtacgtttttagttgatctatcatatcggctggcagttcttttaaaaccgtattggggtcgttaaggaagaattcttctccgttcatcatgatttttttgacttcctgaccattaatgattaatttcccttcttcgtttatttcggctccgggtagctttttgactagttcttccaatgcagcaccttcactgacgcggtaagcggaagtattatatgcggttgtatcacctgtgacgacaacaggcggggcttgggctacaatgacggtttcgttaagaagtacagcatcaggtttcaactctattttgcctagttgaacaatagtctgggttgtgtttatttgcaggggcttatattcggtagcgaagcctatgaaagaaatttttagcaaaaaacgtcccgggagagttgtgagtgaaaattttccctgttccaagctggaaatgccttttatataattactgtcgggcaaggataacagttgtatggtagcttgctcaacagggaactgtgtgtctttttccagaatactcccctgtactgtgacacgttgagtctgtgcttgaatataagcagtatttatgtatgatataattaatgttattagtagtataaaagtcgttttattcataaggtctcccgttatgaggtgttttagtgtttatggtatttcttgcaaatatcttgattttttctgtaaaaagagttcataaaatgataaataaagttcatttgaacgatattcatacccttttgacttatttgaggacctttgtttgcgcataatacctcatctttgcaccgtactcagttttcaataggtattattttagtttttaggaacacttggattattttcaaattcgctgtcggtttaatggaaacattagccgatagtgaattctctttattaagtatgagatatatcatgaaaacaatagatagaaaatgaagaaacctttattgtatttacttattttagtagtggctgttcttggcagctcatgctctcaatcttcggagggcacatttgaagtggggaagaatactttcttgctgaatggaaaaccgtttgttgtaaaagcggcagagattcattatccgcgtatcccgaaagaatattgggaacatcgtattaaaatgtgcaaggcactgggtatgaatacgatttgcttgtatgtgttctggaattttcatgaaccggaagaaggaaggtatgattttgccggacagaaagatatagctgcgttttgtcgtttggctcaagagaatggaatgtatgtcatagtgcgtcccggaccttatgtctgtgcggaatgggaaatgggcggcttgccttggtggctgctgaagaagaaggatatcaaacttcgcgagcaagacccatactacatggaacgtgtgaaactctttttgaacgaagtgggcaaacagctggctgatcttcagattagtaaaggagggaatatcattatggtacaggtggagaatgagtatggagcatttggaatcgataagccgtatatatccgaaatccgtgacatggtaaaacaagccggttttacaggtgttcctttattccagtgtgactggaactcgaattttgagaataatgcactggatgatttgctctggactattaatttcggtacgggtgctaacatcgacgagcaatttaaacggttgaaagaactacggccggacactccattgatgtgcagtgaattttggtccggatggtttgaccattggggagccaagcatgaaacaagaagtgccgaagaattggtaaaaggtatgaaagaaatgctggaccgcaatatttctttcagcttgtatatgactcatggagggactagtttcgggcattggggaggcgcgaatttcccgaacttttcaccgacttgcacatcgtatgattatgatgctcctatcaatgaatccggtaaagtgactcctaaatatctggaagtacggaatctgcttggtaactacctgccggaaggtgaaaccttgccggaaattccggattcgataccgactatagctattcctgctattaaaatgactgaagtggcagtcttgtttgataatctgcctcaccccaaagagagtgaggatatccggacaatggaagcttttgatcagggatggggtagtattctgtatcggacttcattatccgcttctgataaagaacagacattactgatcacagaagctcatgactgggcacaagtctttctgaatggtaagaaactggctactctgagccgtttgaagggggaaggtgtagtaaagttaccaccactgcaagaaggtgacagactggatatcctggtggaagcaatgggaagaatgaatttcggcaaaggtatttatgactggaaaggtattaccgagaaagtagaactgcaatcggataaaggagttgaactggtgaaggactggaaggtatatactattccggtagattatagttttgcccgtgataagcagtataaacaacaggagaatgctggcaatcaaccggcttattaccggtcgacgtttaacctcaatgagttaggggatacattcttgaatatgatgaactggagtaaaggtatggtatgggtgaatggtcatgcgattggtcgttattgggaaatcggacctcaacagaccttatatgtgccgggctgctggttgaagaaaggagagaatgaaatcattatattggatatggctggtccttcaaaagccgaaactgaaggtctgcgtcaaccaattctggatgtacaacgtggtaacggagcttatgctcatcgtaagatgggtgagaacttggacttaacaaatgaaactcctgtttatcaagggatatttaagtcaggcaatggttggcaacatgtgaaattcggtaagaaggtggagactcgtttcttctgtctggaggctttgaacgcccatgatgggaaagatttcgcggctattgcagaattggagttgttgggcgaagatggcaaaccggtatcccgtcagcattggaaagtgatttatgccgatagtgaggaaacggatgccgcgaacaatattgcaacaaatgtttttgatttgcaggaatcaacattctggcataccaattattcctcttccaaacctgcattccctcatcagattgtgatagatcttggtgaagataaagttattacgggattctcttatctacctagggctgaagccggtaaaacggggatgattaaagactataaggtatatttgaagatgcaaccgtttaagatataatgtttgagatttttaagaaaaggttaattatttattagtttgttcattaagttatgaaaatcaagaaagcgactttcacgtgagtgagggtcgctttctgattttcgttcgaaataaaataattcttgtgatggttaaaaccctaagaggaagtatatttgttctctcatctgagatgatttatataattaactagtgtataaatgatgaaaaaaaatgggtttagccgatgcgctgagatgtacatcggtcgtttacgaaaagaggggcgctattctactgcgcatgtgtatgaaaatgcacttctttcttttagagggttttgtggcacacctaccgtgtcattcggacaagtaacccgcgaacacttacggtgttacgggcagtatctttatgaacgtggcttgaagcttaatacggtttcgacgtatatgcgtatgctgcgtagtatttataatcgtggagtagaatcggggagggctccttatgttcaccggttgtttcacggggtgtatacaggagtggatgtccgtcaaaagaaagctttgccggcaactgagttgcataagcttttatatggagatcctaaatcggatattttacggcgtacacaggcgattgctgctttgatgtttcaattctgtggtatgtctttcgctgatttggcacatttggagaagtcgtctttagacaggaatgttcttcattataatcgtgttaaaacgaagactccgatgagtgtggaaatactggatactgctaaggatatgatttatcagcttcagaacagaaaacctgctctgcaagattgccctgattatctatttagtattctgaatggtaataaaaaacggaaagatgaaagtgcttatcgggaataccagtctgccctccggaatttcaataaccatttgagaggactggcaaaggctttgcatctgacttctcctgtcacttcttataccattcgccattcgtgggctaccactgcgaaatatcgcggagttcctattgaaatgatcagcgaatcgttgggacacaaatcaatcaaaacaacacaaatctatcttaaaggctttgctttgaaagaacgtactgaagtaaatagaatgaatttatcttacgtgaagaattgcttggagaaaagtgtaaataatataaagtattagtagtcagtatatatacgtgtatgttacttcttaggtaacggaaataataatggcgcaaagatagacaaaaaaataaataacaagcaaataaactatcctttttttcttttttgatttaaaaataagataaaaatagcctagaacatgaaagaacccttttcttcatattctaagatttttacgtcccataatcaaaggaatttcaccctacgcttagactgagcctcctttagcaacttggtatgtcctatttttcgtgttttaagagatttctcccttcccctgtgttttccgttacctaagaagtaacagaaaaaagaatggtaaaaatagaggatttatgaatcaaattggggtaaggtctctatttaggaatatacatagataaaaaatgaaacaaactgaagctattttgggggatatgcgatttattccattaaagggtgttgtattaattctgattctcatcttgacaacaagccgggttcatgcacaatatgctcttggggcaactgggcagatgatgatacctacagccgagatgcaggaaacaggaacctttatgggaagcgcaaactttcttcctgaagaggttacgcctaataagtttaactatcctaccatgaactactcggtagatatgtctttgttctcttttgttgaactgacttaccgtatgacgttacttaaaatgcgaacgtataatggcagagtcggttatcacaaccaagatcgttccaatactatccgtatccgtccattgaaagaaagccgttatttccctgctgtggtaattggtgcagatgacctttttacagaaaaggctactcagtattggggagattattatggtgtcttaactaagacatttggtttctgcaaggggcatcagttggctgttacagcaggctggtattttcatcagggcaatcaaccggcttttaagaaaggcccttttggtggtattcgttatactcctgctttttgtcgtgagttaaaattgatggcagagtatgataccaatggatggaatttgggtggagcaatacgtttttggaaacgtttgtctgtccatgtgtttacacgcgaatttacttgtgtttctgccggtttgcgttatgaatgtacattaatacattaagaagatgaaaagagtatttagtatactatatattatatgttgctgcactttggagagtgcagacgcacaatctgctgggatatctgaagtcctgaaagaattgcaaatggaaaatatttctgtagtacagaagcaggatacgattacggcagcatttgagacttccgtatataggggatcttataatggtataggcattgcaatacgtcgcctgatcactcttccggaagtaactacattacaattggtcatattggataatgctttgccgcaactttgtatcactttgcctgcgaagctgattgaggattatcaatcgggaaaatgtgatttggatggagtttaccgtaatatgcagatgactacttccaccaaaactgcaatggaggccttaaaaggaacaaaacgagagtctactacttttgggaaagtggatgtagtgctttatccgggtgtgatgttagttaataatgttacttacaaattatataaagcagcttttgaattgcaaccggctgtagaaatgcaactttggaaaggtgcttcattgaggctgcaggtttgcttgcctatcgtcaataatgagccgggcaaatgggattgcatccgaccggggtatttgacattgcgccaggaatttcgtctggataatcattggaagggatacctgactggtggaaatttctcagatgatcgtcagggacttgcagccggtatcggttatttttcttctgacggtcgttggacagtagaaggagaaggtggtataaccggttcgtctcatttatatggcaacgactggggaatgagtaaatggaaaagagtgaatgggcagctcagcgtaggttatttcattccacaagtaaatactcaattgaaagttagcggtggacgttttatatatggagattatggggtatgcggaactctttcacgttacttcggtgaatatattgtgggactttatggcatgtatacagatggagaaaccaatgccggatttcatttttcgattccattgccgggtaagaagcgtagtcgtcatgcggtgcgtgtgatgcttccggattatttcgcttttcaatatgacatgcgtagtgggaatgaatttgctcgccgtgctttgggggtaagctatagaaccgaaccgaaatctgctgaaaacagccgtttctggcagccggattatatccgttactatttgattcgtaccaatgaaaagacaaaacttaaataagagttgatattagtaatttaaacaaaaattgaacaattatgagaaatttaaaatggttgtatgcatgctctttggcgatagccttcggtgtgttgtcttttgcagcagtttcctgtcatgatgatgacgatgaaccaaaacaagagccgggtgaagttatcgaaactcccgctccggttgttgagtattacattatgggtactgtgacggatgccggtaaaggtatatctggtgttgatgtaaaaattggtattgagacaattaagacagacaaggatggtaagttctctgtaacagaaacaaaaacaggtaagtattctgtagaagttgctcctaaaggttatcttgctcaaaatacttctgtagagattgctgctaatgcggaaaatcgtagtgtggtaactgttgctgtggctttgactaagcaaagtgaacctacgactgtagaagttggagaagatggtaatgcaacagaagttaaggtagaagataagagtgcttcgaatgaggaagttaaagaaccgggtactgttgcaccggagaatgtgaaagaagatcttcctcttgtaactcctgaattagaaatcccagttggagcaattcagacagaaggtaatgaagacgttctaaaaggcggtaatgctgaagtcagtgtaacaacctatgttcctgctcctgaggaggtgactacaga

SEQ ID NO: 4565 - DNA, 44763 bp, Unknown
  gut microbiota DNA sequence
tcccagacagccaatctttttgttaaccttaaatctaatactatgaaaaacacactacaaagatacggactttccgcatatctccaaattataggagcaaagcagggcatcttataacatggtttaataaaagctgcagactcgttaacatttaacataattcctccggatattaacgaatacccgaaggagtgatctaaaagctattcatatcttaacgaacgagcaggtttgctcattattattttcattgtctgaaaggccaccgtcacgaatgaaatgaacaacatcaacaatacgggcacaataaagaaccaggcttctaaatccgtccggaaagcataatgactcaaccaggcgttcatactgaaccaagctaccggaagagcaatcacaaccgctatcagaatcagcaggaaaaatcctttgaccaactgatagaaaagattccagcgggaagctcccaagactttacgtatacccatctctttcgtacgggtggaacaggaaaacatcaccaatacccaaagtcccagacaggatatgaatatcgctaatccggtgaaagaacctatcatcaccccgaatacttcatcctgacgatactgatggtcgaagaactgatcgaggaaaaaataatcgaaactggaatcagcaaagtaccgattccatatttcctgtacctgcgataccagttcgcggggattgccggaagtcattacgatagaaatatagcgttgtggcaaccagtctatcttatctttatgaatcagcataataggagtataattcttactcaacgcctgctgatgataatctttgaccactccgataatctgcatcggagcatcggtacattctactgttaccaactctcctatcgcctcatcattggaagcaaagcccagattgcgtacggccgtctcattaatcaccagtttatctacatcgtctccgtactcttctgaaaagccccgtccggctatcacttgcaaaccatatgcctctatataatccggatcgcaggccagcatctcataaagccggttctgcttcaaagcgtcattggtacggcgattggaaaggaaagtagccacctcctcgcccggcacagcaccggaagctgcgacactatgcaccagtggcaaccgcattatcgctttcttcatcgcttccagtttcacatttagcccgtctgtacgtccgggaaatttaatgactaatgtctggtcggttttcacccctaatgattggctgcgcataaaattcagctgtgcaaacacgatcaatgttccacaaagcagtatcatagaggccgtatattgaatgataaccaacacctgacgagtccgttctccggacttgctatgcaaaaactttcctttcaacagggtaatcggtttacggttcagcaaagccaatgccggataatatccggaaaggaatatccctgcgataaaaacaaggaccagcagcacccaccaataatccatcagccaaacggagaaagtgaccgtacgtcccaccagttgattaaagtacggaagaatcagctctatcagccctaccgccaatataaaagcaatcagattcataaccagcgcttcgaacaggaactgatgaatcaactgcttgcggaaagcacccactacccgacgcactccgacttccctggcacgctccatcgaacgggctactgtcagattgatatagtttatccaggcaatagccagaatggcaatggctgcaaagacaagtgcaatcatagcagaacgatttccttttgtctccatttcataacccaattgcggagtgagatgtatatctgccagaggaaccaaatcgactccccatgttttgtttttcaacgcttcctccgtcttgtacttttccgccatgacgggaaactctctttctatttccgcttccctctccggcgaatcgagcagaacatacgtatatgcttcgtgcttataccagtattcatgtataaacttgggcaaagatgtatacgaaatcaggaagttataatgtatgtgggaattggaaggcatttcctccatgactccggtcacttcacacgatatcttataatagggaccggtaaagataagaatctttccgatagggtcttcctctttgaaatatttgcgggcaatgcgctcggtgattacaacttgtcccggcatcgaaaggctggtctttttatcacctttcagaagctcgaaatcgaaaagacggaaaaagcccggatcggcataagctatctggttttcccgcagcgtcaactcaccatacttcacaatctgttctggttggagcagagagccgattcgggtataatcttcaattcccgcaagattctctttcattgccgaaccgtatccgaaggagctgcttgcccagttgtcggtcatcacctccccttcgcggaatgtactttgcacacgataaatatggggatatttcgtgtgcatcttgtcaaaactgaactcgaaagttacatacgtcaggatcagcaacgccgatgccatgccgatcgccagtccaaacacattaatgaagctgaactttttccgcttcatcagattccgataggcactattccaataatttcctatcatactgcttcgtttttagaggacgtacttttttcaaacggacggttgatgttttcagatacaatctgtccgtccaacaaccggataatccgatgcgcatacgtcgcatccctttgcgagtgggtgacaatgataatcgtagtcccctggcggttcagttcgctcaacagctccatcacttccacgccattcaccgaatccagatttccggtcggttcgtcagccagcaacaacttacagtccgtcactaccgcacgggcgatggccacacgttgctgttgtccgcccgacaactgttgaggataatggttggcacgatgtagcagatttactttctccagcactttgttcaccttctctttgcgttgggcagccttaatccccatatagacaagcgggagttccacattttcgtataccgtcagttcgtcaatcaggttgaaactctggaagataaagcccagattattcttccgaagggcagtcagctggttctcgttcattttatccacctgtttcccttcaaagaaataagagccggaagtgggagaatccaacgtgcccagaatattcagcaacgttgacttgccgcatccggaaggtcccattatagcgacaaattctccttgttctacgtgtaaggtgacttcgttcaatgctttcgtctgtacctcttccgtagtgaaaagcatagacagtttttctgttttaatcatggtgattctttttatttattttagtattagtttctcattgtctccgaacaactcataaccggatatgattactttctcacccgaagacaaaccttccgtcacctcataatactgtggattctggcgcccgatcttcacaggacgccgcgtggcaaatttaccactttcatcgacaatatacatccaccgccctccggtaatttgaaagaatccgccacggggaacaaggatcgcttgtgccgggtctcctaactgaaggttgatatgataagtttgtccggcacgtatattctccggccgctccgaaatgaaagccagatcagtacggaactgcccttctttcacttccggataaggtttggttacttccagtttataggttcctccgtcacgggtaaagtcggcgggaagtccgggaagtacacgctccacataatgctcgtctatctgtgcctgtactttgaggtccggagtaataatctgcccgatatgttctcctgcggaaatggactgtccgacctgcgcgttcaagtttcctacctgtccgtcaatcggagctttaatcttcaggttttccaagcgctcacggaccaacgtaagactgcgtttcatgttgcgtatgttctcgtccagactgctgatctggctttcacggaaaatattgtcctgacggatacgttcgtcaatgaccgccagttgttctttggcagcttcatactcctcctctgcctgacggaagtcctcgcgggcaatcagttgttcctccaccaaacgtctgtattgttcataacggcgttttttcaatgtcagttctttattcaagcctatgcgttcctgtttcagttgcagacgctcctgctccatactgatgcgggtattgcgcaattcattttcctgataggcaaggtctgcctcactctgcatgattccgatattcagcaacgggttgctgagacgcagaatcacatcgcccgctttcaccatagctccttcttctttcagacgttcttccacacgaccgccttctatggcatccatatagataatccggctgggcatcacttgcccgatcacacggatataatcattgaactccgcttgcttgacggtagcaatcgtgagacggtctttctcaactgtcatggaggaagccgtatctctaaaaataaaatataaaatgacagcgattcccagcgccacaccaccgatcgtataaaggtgtttgcgatttatgccgggtctgcgttcaacaggtgtatccataaaggtatattcaaaatagggttgttattaaatgattgatccgatggcacagactccgttttacaggaaagtcccctcccgatagtatttctccagtttcctcatcatttccacttgcaggcgtacacgaaccagttctgccttggcggagataaaacggttacgggcttccatcagctgaaagacggaaatgagtccttcctcccatttacgttcggactctttcagtacgagagcttctgcttcaagctgttgcaatgcctgttgatgttcactaaatccggcatgtagggaaagaagtgtttgctctatatcggtatatagctgctgcttttccagttcttcttcattcttcaagcgatacaggtttagtttctgcttccgttgatgagtcagacgttccaatccgctcagcaaaggaaacgaaataccgatgccgacatattttcctatattgtcccgcaactgtctggcagaaaaaactgtattgtaaaaattggaaccaaccgtaaagcgggcatagacagaaggagaaaaagttccaccagccatcgcatactctttacaggcagcctttcgtttcaaatcaatcatacgcatgacgggaagtatttccagtgattgggcataaagtgtttccgtagacggaacagaaagcaagggcaactgattcgcttccacaatagtatcctgaataacgagtgtatcaccgggttggaaattcattagctgttccagatgcaataaggccaaccggcaagtattctcacgagatttataacgatagatatccccttctctgcgggccttgacttcctgcaaatcggaagcggatttcaatcccaactcaacaaaggcttcggtttgtttcagataccgctcactcaaccggctttgttctaaagcaagattcagcagttttctctccagaatcagtttataataagcatccgtcacttgatatgccagttcattctgcttatttttcagtgcccattcgctacgttccttattcatcttccggaagcgtacctgatgaatgcgtgaaaagccttcaaaaagagaaagagtcatatcaagccccacagtcccttcttcaaaagtttcgttggtatatccgttcgtatccggatcgatagaacgcccaaagcgtttccctgtttctgcattaaccgctgcacggggaagaaaagcaccgacagcagccatataatctgcccgtgcctcctttatatctatcacactgttccgcacagaaggattctgcttccatgccagacgaatgcactcatccaaagtcatgccggactgggcctgcacaaaatgcggtaataagaataaggacaaaaagaaaaagtttttcattctttataatatatgcgattgtgtgttacgatgattagaaggcaaataggatgccacaatttttaagtaattgattattaaccaaatgaccaatacgattgcattgcatccgtccaattattacacaccgcaacgtccaacttttggacgttatccattatttcatattcttcgggagcaattttcgggcatttaagtaagccttgcagtaaatatgcccgaaaacgtctaattattggacactcgcttgcagaggaaagcaaaaacgaatatctttacccccaaacttaaagcatggttcaacctgatagatacccccaatcttagatatggaaaacggaactattttaatagtagatgataataaaagcgtgttagcttcactggagttactgctcgaaaatgagttcggtacagttcgcaccgccgccaatcccaatcaaatcaccacgttactgactaccacctctatcgacgtcgttatccttgacatgaatttctctgccggcataaacaatggcaatgaagggctgtactggttaaaacaaatccacgaaatccgcccatctttgccggtggttatgctgactgcttacggagacgttgaattggcggtaaaagcactaaaaaacggggctactgattttttactcaaaccttgggataatcagattctgattcggaagataaaggaggcttataaaagtaacaacagcaaagccaaaagcgcttcaaaggcaaccggcaaacagggggataccgagaaaccgagcaaaccggaaatgttgatcggccactctcccgcaatgctccagttgattaaagtggtcacgaaagtagccaaaaccgacgccaacatcctgatcaccggagagaacggaacaggaaaagagatgttagccaaagagatacatcgtttatctccccgaaattcccgtcaaatgcttggcattgatatgggcgctatcagtgaatcactcttcgaaagtgaactgttcggacacgaacgcggagcgtttaccgacgcatacgaaagtcgtccgggaaaattcgaagcggccaacggcagttccctctttatggacgaaatcggaaacctttccattgcactgcaagccaaactattgactgtactacagaaccggaatgtcacccgaatcggaagtaacaaagtgattcccgttgatatccggctgatctctgctaccaataaagatattccggaaatggtaaagcaaggactgtttcgggaagatttgttctaccgtatcaacaccattcatctggaaatccctcctttaagggaacggagagacgatatcctattattcatagatactttcctccgtcgttttacttccaaatatcaacggccggacatacggatgcacgagcaaacgattgagaaactacgctcctatcactggccgggcaatatccgcgaactgcaacacgccatcgaaaaagcggtgatcttatgcgaaggcaacgtgatacgccccaaagatattctggtaaagcaaagctggaaacctcagacggcaagcgtcgtccccaatctggaggaagtagaacggcaagccatcgaaacagcgattctccaaaacaatggaaacctgacagccgccgccgaacaattaggcatcagccgacagactctctataataaactgaaacgattcaaaccctgaacaagatgatattcagccgacatatctattgggccatattgcttcgtatcctgctcatcctcgcaacttcgggaacagggctgtggctcatcatctcccaacgtggcatcatcatcggaacgttactaatcatctgctccctgtttcaaatcggcggaatagtcacttatctcaataacatcaaccggaaactccggcttttctttgatgccatcgaggacagagataatacattcagctaccccgagcaaggaataaacgaagagcaacaacagctgaaccgttcactgaaccggatcaacgccctattggcacaaaccaaaatggactaccagaaacaggaacatttctactggtctctgctggagaaagtacccaacggaatcatagcctggaacaactccaagaaaataatcttcgtcaacaacacagcgttgaccttactaaacatcgaatcactgactctatattcccaactggaaaatatcctgcagaatgagaagaacagaaaaaggctcagcctctcccaaagtcagatgaaactacaagacgaaacaatcaccttgctttccatacaagacattgacgaccggctcaacgaaaacgaaagtgaatcatggagcaaactcagtcatgtcctgactcatgagatcatgaacacgatcgctcccattatctcactgtctcagacactggcttcctatccggaaatcagcgagaaaggaatccgcgggcttcacattattcaggcgcaaagcgaacggctgatggaatttaccgaatctttccggcatctgtcctatcttccgcagcccgaaaagcgtctcttttccctatccgacttattacacaatctggaggaactgcttcaaaccaattttcaagaaaacaatatctcctttacactccggtgctcccccgaaccgatgatgaccgaaggagacgaaaagcaactgtcacaagtgtttctcaatctgttgaaaaacgccatgcaggcattggaggggcatccgcatggagagctttccctgcaagcagaacaagacgaacatatagtcatagacatcaccgacaatggtcccggtattcctcccgaaattatggacaaagtattcatccccttttttacgactaaatcagaaggtacaggcatcggactaagcctgtgcaaagaaattatccgccgccacgaagggcatttggctatcaaagaaagcagagccggaaaaacggtttttcatattgagctcccttaaaaacaacatacgtaaacctcataccggacattcaaactttttccactgttcttttgtttataaagcagaatatctaaatacataatatgagcatcaaagaacaatactggaaatattccctcatcgtcatcatactatttatgggaatcatcatcttccgtcagatcactccttttttgggaggattgctgggagcactcactatttatattttggtacgcacacaaatgacgcacctgacggaaaagtggaaactgaaacgcagtgttgccgcattgctgattacggcagagacggttatggtatttttggttccgctcggactgacaatctggctactggtaaaccaacttcaggacatcaatctggacccgcaaacattcattgccccgatgcagcaggtggcagagtttatcaaagaaaaaacgggttatgatgtgctgggaaaagataccttgtcattcattgtctccatcctaccccgcatcggacaaataataatggaaagcatcagcagccttgccatcaatctgtttgtcatggtattcgtactatactttatgctgataggaggaaaaaagatggaagcttatgtgaatgacattctcccgttcaatgaagcgaatacacaggaagtaattcacgaaatcaatatgattgtacgttccaatgccatcggcatacctctgttagccattattcaaggaggggtcgccatgatagggtatcttatcttcggagcacccaatgtcctggtattgggattcctgacctgcttcgccaccatcattccaatggtaggaactgccttgatatggtttcccgtagctgcctatcttgccgtaaccggagactggttcaacgctatcggactcgccgcatacggtggaatagtcatatctcagtcggataacctgatccgattcatcctgcagaagaaaatggcggatacccatccgctgattacgatattcggagtcgttatcggtttgccgttattcggatttatgggagtcatcttcggtccgctgctgctttcattattctttctattcgtcgatatgttcaagaaagaatatctggatttacgaaataaccttcctgcgagatgacggagctaccaaaaaaatgcgtacttttgcagtcgtaaaaacgacacttatatccaatggaagcatttacattcaatactgtcgaactgattcttttatcggcggcaggtattctttttatcattcagctcatttattatttcggcttgtacaatcggatacatacccgcaataaggctgtacgcaaagaagcagtgcacttcacacaagagatgcctccgctttccgtgattctttgtgcacgcaacaaagctgataacctacgtaaaatcttacctgccattctcgaacaagactatccgcagttcgaagtgattgttatcaacgatgcttctacggatgagacagaggatgtactgggatttatggaagagaaatatcctcacctctaccacagcttcactcccgacagcgcacgctacatcagtcataagaaacttgccctgacattgggcatcaaggccagcaaacacgactggctggtatttacagaaacaaactgtatgcctgcaagcaaagactggctcagactaatggcacgtaacttcacttcacagactcagatagtactgggatacagcggttacgaccggaccaaaggatggctgcataaacgggtagcctttgacacgttattccagtctctgcgttatttatgctttgcattggcaggaaagccatacatgggcatcggccgcaatatggcttaccggaaagaattattcttccagagaaaaggctattccacttatttgaacctgcaacgcggggaagatgatttattcatcaaccagatagccaccccatccaacacacgcgtagaaacggatatcaatgcaactatgcggatacaaccggtatacagctacaaagaatggaaagaagaaaagataagctatatggcaaccgcacgcttttatcacggtgtacagcgctatttgttaggattcgagactttctcccgtctgctgttttacgctgcctgcatcgcgggtcttgtattcggcatcctcaacaaccattggctggctgccggaattgcattactgatctggctgttccgctataccgtacaggcaatcatcattaatcggacagccaaagaaatgggcggagacaggaaatattatttctccctgccggttttcgatatcctccagcccatccagtcgctcaaattcaaactttaccgctccttacgcaggaaaggggactttatgagaagataggcaactgctgattacatgggccgctgcatatagatcgcatccgaaccatcatgataatagtttggctttactcctacgggaataaagccatttttcatatatagcttgatggcaggcgtattcgactcttttacttcgagcgtaatctttgccgccttacattcaagagctgtctcaatcgtccgctccatgagcaactgtcccagcttccttcctctgcagtccggatggacggctatcgaatatatccgcagataacgggttcccgcatgaaacaataatgagacataggcgatcatccgctcctgttccactaccacataaaaggtgccctttgaacggcagatcagataaacaaactgttctctcgaaaaactatcttcctgaaaacattcctgctctatctccagaatggcaggaatgtctcccacttttgcctgacggaggtgtatcgttggttccatcattaataatgtttcatttccagcgcctgctcaaagtgattcaacagacggtaatacatttcgtcaccgataatcgcatcttccagttcatggtcgatactcggattatcgttgatttcaatcacgtaagccttatcatcgaccatcttcaaatccactccatacaagccttttccgatgagattggcagcctttatcgccgtatccagtaccacacgcggcacctgatagataggaatcgtatccaccagtccgcagcggctcctgcccgaatcataatggcagtaaatctgccaatgaccttttgccatataatacttgcaggcatacaaaggtactccgttcagcagaccgacacgccagtcaaactccgtaggcgtaaatgcctgtgccaacaagatagccgacttctcgaaaagaagttcaagacttgttttcagttcttcttcattggacacctttttcatgccaatggaataggaaccgtccggtatcttcaagataaaaggagcaccaacctgctcactgatctgttcgaacgagttctcattggactgaaaaatcaacgtagacttcggtgccggaatcttttctttctcaaaaagttctttcagataaaccttattggtacaccggatgatagacaacggatcatcaatgacgaccatcccattctgggcggccaactgtgacaaatggaatgtataatgattcagcgaggtcgttgtccggataaacagcgcatcaaattccaacagacgcatcgcatcatcctctgtaatcatttcgacgtggatattcatcttcttggccacttcggagagtttatgcaaagcgcctttgttgctgggcggaaatttctctttcggatcgatcagtaccgccaagctatatctgggagcttttgccgacttaggcgcacgccatattttcttattaaaattatccagcgtattggcaaagaagtcctgttcctcatcatccaaccggttcaaaggcaagaactgaatactttcaatctgattcttgggatgagtgttcagagcgactctcaacaaagggcagggatagttctcgaaaatgaagcgggccactctttccagccctttctcacggcatttcccgaaatagatattcagataccagatatcacttttgaccccgttcttctgaatccattgataacacaacgcctgcagacttcggtccatgcggattcctgtccccgtctccagtttgttgatgatgtcaacatcgggaatcacccgttgtcctctcgtctgggcaagcaacgaacagtaatacccttcggagttatagctgtaatcattgctaagattaataactaacttccgatctttttcaaccggcttgttcttcagatagtcggaaacagtcaggatacttttcgtctcacaatacggcttccagtcatccggattatccaacagaattaacacattattcataatggttaaaaattaaacctacaagaggatattaagtaaatcgggcgcaaatatagacatattattcactctacatcacgctacggtctaaattatttttgcagcaaaaaaagaaaagaaaaagagaaaattactcgtaccgcatggagcttgcaggattgatcttcgttatcaagtatgaaggtccgatcaacatcagaaccgatgctagcaacgtacctgcattgatcaaaaggaagaaccagacattgaaagaaaccgataccgtatcaacataataattctccggatcgagcttaaatattccgaattgggactggataaaacagaatgccagtccaatcgcattgccccaaagcatccccttgccgatgagaaagacggcaaaccaaaggaaagtcttgcgaatcgtaaaattattggctcccagcgctttcagtattccgatcatattggtgcgttctatgataataatcagcaaaccggaaatcatggtaaagccggcaactcctatcatcaggaaaaggattacccatacattcagatcaagcagattgagccattcaaatatctggggattcagttgctctatattgcgtacataatacacgcctccaaacttatcccgctgactatccgtatcaacggctatctcgtaagtgatatcttccagtttatcatagtcgcgcacctgcaattccactccgctcacctgctccggttcccagccattcaggcggttcaccaaataaaggtcagtcagcagaaacagattatcatactccgagaaattggtctgatagatgcctgcaatcgtcaagcgccgggcacggatattatcctgaatataataggtatatatcttatctcccagcttcagcttcattttagtagccagcgccttggagataagtacctgattactggaagccgaatcactgaacgcaggaatctccccttccaccagatactcctgcataaaactcggatcaaactccggtccgacacctttcagtaccattccctgaaaagcatcatccgtttttatcatccccggcttggtagaatagcgttgcacatggcttacttggggataaccggaaagagcagtcatcatactgtcccccaccgctatcggatgagtctcataagaattgaccgcatccagattcgctatctgaatgtgcgacccgaacccgatgactttattccttacctcacttttaaaccctatgactaccgccaccgcaataatcataacagccaaccctatggcaataccagccatagcaatgaggaccgcaggacgtgaaacctgttttccaccatcgctctcgcgataaatacgacgggctataaaaagagataacgacaattcttttaagtattaagtaataggtattaagtattagccgtagcttatttagagattaagtattaagtgttatattaagtattaagtcattaccttatgatatattatcaatcttataatatctcatacgccaaccagcgtctacggttaatacttaatacctattacttaatacttatttcctattccgttcttcccggatacacctccaacgccttttgcaggatgaaaagcgcacgggtcaaatcttctttcttcaatacgtaggcgatacgcacttcattgatgccggagcccggagtagtatagaaaccggaagccggtgccataaatacggtctggccttcgtattcaaagtcagaaagacaccatgcacagaacttgtccgagtcgtctacggggagtttggctacggtatagaaagcccccatcggaatcggagaataaacgcccggaatacggttcaatccatcaattaagcatttacgccgttctacgtattcatcatacgtctcacgcgaatattcctccggagcatccaaagaagcctcggcggcaatctgtccgatcaaaggaggactcagacgagcctgacagaatttcataacagcgtcacgtatctctttgttcttggtaatcaatgcaccgatacggattccgcactccgaataacgcttggaaactgaatcgatcagcactacattattctcgataccttccagatgacaggcagagatataaggagagccggtataaataaattcacgatatacttcgtcagagaagaggaagaggtcgtacttcttcaccaggtcacggatctgattcatttcccgacgtgtatacagataaccggtcgggttgttcggattacaaatcaggatagccttggtacgttcattgatcagttcttcgaatttctctactttcggcagggagaaaccttcttcaatggtcgttgcaatcgtacggatctttgctccggcagagatggcaaatgccatgtagttggcgtatgcaggttccggaacaatgatttcatctcccggattcaggcaggaaaggaaggaaaaaagtaccgcttccgacccccccgatgtaatgattatatcgtcagccgtcaggttgatgttgaactttgcataatatcccacaagtttctcgcgatagcttctgtttccggcactggggctatattccagcactttacggtcgatgttgcgtatcgcgtcaatcgcggcctgaggagtgggcaggtcaggctgtccgatattcaggtgaaacacatggactccccgttgcttggcagcgtctgccaaaggagccagttttctgataggagatgcaggcatctcgtttccgcgaatggatatggttggcataattttaactacaaattactaattactatttacttttttaatttggaactgcaaatgtacgcaataatttgaatacagagacataaaaactttaaaatccttatcaagggtaaaaacgtagtggaaaaatgaaaagaaagctatacatttgtaatacggaaaacttaaaacaatatcataatgaccatacaccttatctcatttgcttcaatacttcacaaacaagcctcgctgcgcaattcgcacgaagcaattctaagtgaacttgaaaaatattacactgtcaaactcatcgattatcaagatatggataagttgggcagtgatgatttcaaaatcatttttatcgctaccggaggtgtggaaagactggtcatccagcacttcgaacgtcttccccgccccgccattttattggccgatggcatgcagaactcacttgctgcggcattggaaatatctacatggctccgtggaaggggaatgaagagtgaaattcttcatggagaattaccgtctattattcaacgtgtacatatactatataataatttccgcgcgcagcgttctttgttcggcaagcgtatcggagtcatcggtactccttcttcgtggctggttgccagcaatgtggattatcttctggcaaaacgccgttggggaatcgaatatatagatattccgctggaaagggtttatgaacattttaaacaaatcacagatgatcaggtaggcgcgtcctgcgccgccgttgcttcgcaggcgcttgcctgccgcgagggaactcccgaggatttaatcaaagcgatgcgattatacagggccatcaagagaatttgcgaagaagagaagctggaagcgctgacattaagctgcttcaaactgatcgatcaaattgatacgaccggctgtctggcattgtcattgctgaatgatgacggtatcatggcaggctgtgagggagatctccagtctatcttcactcttctggcagttaaggcgctgacaggaaaagaaggattcatggcaaatccatccaccatcaatacgcgaaccaatgaattaatactggcacattgcactataggactcaaacagacggaaagatatattatccgcaatcattttgagacagagaaaggtatcgccattcaaggactgctgccgacaggtgacgtgactatcgtaaaatgcggaggcgaatgtctggatgagtattacctgtctaccggaactctaaccgagaatacgaattatatcaatatgtgccgcacgcaggtgcgtatccgcatgaatactccggcggattatttcctgaaaaacccgctaggcaatcatcatattatgattcatgggaattatgaagaagctttgaatgagttcctgttatcgaatgcctgcaaaaggacggaataggggatcgaaacagaggctctgttatagataaatgcaggctctgtcagcagttgacggagcctgcatttattataaacagaagctctgttttattgtaacagaggcatatctttccactgtccgccgtgccactccactactgtgtcaaagccgactttcttcaaggctgccaatgcttcggcacgactgttattaatccgttccggataatgggcatcactattcacctgtacccgaatacccaattctttcaataaagggaaatagcgttcgttcggatagaaagttcccaaatcatgataagacttagtattaatttcaacgatatatccatgacgggctatttctgcaaaataatcgcgaaccaacgcatcataccacggttcgtccaataatcccggacgatagcaagaggcattatagtgcatcttatctgcatgaccaaggatatcaaaacctcccagctcgaccatacggagcagattcttataataaaggtggacaacgtaatcgagatcaccttcaaaatgcgcatctatcaattgacggaatatatcggcaggggtatcgatatccacgactttgccctgcggagaatagagcatgtgcacagaaccaatccgataatcgagcggcaattcctgaaaacgagggatagcgggatggctctcttcattcagatagtctatttcgagtccgatggcaagctctattttatcggcatatttctccttcagacgagcaaattcggaaaggtaatcatccatccggtcccactccatcgtccatgctgtagaaaatggcagaggagcgtgagaagaaatgccataagaagaaaagccttcactaatggcaaaacggataaaatcttccatattagctcgtccgtcacaatataagcagtgactatggtaattggtcaggtttgtcatatcggtctatgttatttcggttattatcaggttgtttcagttattacagtttctttccgttcagattcatgtcagccttctatctcgctcagttccagccagcgcatggtcttttcgtcaatcagatcattcacttcgggcagacgtttcgacttttcagtcagttcgtctacagaaagcattccgctgcaaagcagttcttcaatctgtgccttctccgcttccagttccgctatttctttttccagttgttcgaactcacgcttttccttgaagctcattttccgcttatcgttcagacggacacgggcggtcttctcttcctgcggcttttccgcttccttttctttctgtgccttggcttctttccagtcacggtaatcgctatagtttccggggaagtcacggatatctccctgtccgttaaataccatcagatggtctactaccttatccataaagtagcggtcgtgggaaacgactatgacacagcccttgaagttctgcagatactcctcgagcacattcagagtgatgatgtccaggtcgttggtaggctcatcgagcacgaggaagttgggattacgcatcagcaccgtgcacaggtaaaggcggcggcgctctcccccactcagtttatagacatagctatgctgcgtttcgggagtaaacaggaaatgctgcaggaattgcgaagccgtcagtttctttccattccccagttcgatcacttcggctatatcctgcacgacatcaatcaccttcatttgttcgtcgaactggagaccgtcctgcgagtaatagccgaaacggacagtttcgcccacatccaccgttccgctgtcgggtttgacctgtcccatcaatattttgataaaagtagatttacccgttccgttgtttcctacaattcccatcttctcgtaacgggcaaagatataggaaaaatcatccagaatcttcaggtctccgtagctcttgaacagatgatcggcttcgaatatcttgcttccgatataagaggcctttacttccagttttacgttgtcattgttgaaacgttgcttggcaaccttctccagttcatagaaggcatcttcacggtatcgggctttgtgtccgcgtgcctgcggcatccggcgcatccagtcgagttccgtacgatagagattgttggcacgttctatttccacgcttttagcctcgatgcgttcctgacgtttctccagataatagctgtagttacctttatattgataaatctgctgattgtcaatttcgataatctccgagcagacacgatcgaggaaataacggtcgtgcgtcaccatcagcaggctcaggttggtgcgacgcaggtagtcttccaaccattcggtcatgtccaggtccagatggttggtaggctcatcgagaatcagcaaatccggttcggtgatcagggcgttggctaaggctacacgtttcagctgtccgccggaaagttgcttcacctgctggtcaaagttacggattttcagttgggacagaatttgcttggctttctgctcatattcccatgctttctcctggtccatgcgtgccaagaggtcttccagtcccggatgcccttcggtttccatacatcgttcgtactctttaatcagttcgacggtgctgttgccgtgatggaaacaggcttcgagaacggtcagttcttcgggatactgcgggtcttgttccagataatccacacgaaggtcacggcggaagacgatgtttccgctgtcatacccttcttttccggcgatgatattcagtaaggttgtttttccgctgccgttcttggcgattaatccgacgcgttgcccctcggcaatgccaaaagatatattttcaaaaagaaccaagtcgccgaaggacttggtcaggttgtctacttgtaaataaggtactgccacgtaatttagtgattagctggttcgtgatttagtgatgatcgattgccgattgatatgcttcggcaatgttgcagggttggccggccttaactttgctccatgcgattttcatcgggtcgatggtccggccttggtattcgagtacggggacttcccgattgccgtcaatcaaggttttccactccatgccttccacttcgttagtcagaatcgcgcataccgttataccgatggcgagccattcatctttcttcttggggctgatcttaccgctgtctatcacttgctgaatcttctccaagtcctcttccactccctgaaagtcttttttgagttcctgtttgacggtagatactacccactcgtagccttcattgatctgatagatttccgataggcggacgggaatcagttctgcgggatatttctcgccttccttgcgggcttccagtgtagcgatgacctcttccgcttccttggtgcttccgcctttgggtacggtgaaagaacattcaaaagcgatattgccggttcctgttatccacaggtgagaagtataataagtgccctcttcctgaaacatttctttactgtaggcacagtcccatgtaccgattttcaccaatgaagccgaatcgttttctttcagttcctgacggatggcatctttaccgtatgaggcgttgcctttaaaagctgatatacgaaagttgcccgtccatacatcggggttatagaaaagaaaagagccttcgccatcttcaaactcgttccagtccgacggataattcatcgaaaaccatgctccgggggagataaatttcttgccttgcatcctttttcattaaatgattacttgggcaaaaatacgaattaaaaatgaatttcactttcctatcggctgtattttcctccgtacttctttggaaatctccagaaacatatagttcagctttccggaatggatgcctgcttcattgtctttgtactttttgttggcgtactgtttggatttctcgaaagtgagcagtgacatttcgttctgcgatttgccgaccatggtagagtccagttgttcatccgggaagaagtcgtcgaggtctacatcaccaatcatcgtcgtttcgaggaagttcatgtccttatgggagttgtcggtgtaatatcctacgaacatatgccccggtgtacgtaccagtatcggttcgatattgatagcccgaaggagcgaagcgaacagtacgctgccgtccacacagttgatctgcgacgattccagcgcatcgtcaaaggtgcggacgcgttgcgagaaaacgacattgctcgaaaggctcgtattggatacggaactgtagcggaacttacgtttctgtaagatgttccaaagtgcgtacacctgcttgtctaccgcacctttggccgtgctctggtagcccaggaaacgattcacgatgcgggtattcagcgcttcacgaagcagctggtcgatcatcggattctcttcgttgacgtatgcggcaaaaaagatactggtatcgtaaaacttcgtcccgttcgccacataacccaacaggcattcattgacgctacgcaccgaaaacgtacgtacccgttgtcccaagtctttcccgttcatctccacttttacggctacgctcaccggttccgcctgtgcgttattcttcagtgcctcgtaattccagatgatatcgggataaatagtatattccgtcctcggcttgttcagcacaaattccgacacggaacgggaaaagaaaggggtctcggcaacctctatccgcacccggctgtaagcagtccttgacttcacccgaacggcgatgcacgatttcggatttccgagacaggtagaatccgaaggagtaatcacctgcgcgtccgtagtggctaccgacaggatggccgacggaaagatatttcctcccagatcgtctacaatctcaaagccggaattaaaagaagtatatttaaagacggagattcccccgatgagaagaagcagtacaatcacccctcctaccacttcgcgtctatatcgtttcaagtctatttttatcatgatctgcaaactgtgtatttattatcctatcgctacacaaagataacaaataacagacggtttttcctcgcatatcccataaaaactttcaaatatcatcccgatgcccgcattcagcggaatgtaatacgattgtaatatttgtttcatccgcccgtaacaaagtcttctcatctttgtcccgaaataaaaaaaagcttaactttgtcatatcacattaatacatatatcatatgaacgattaccgtattttagttgtcgacgatgaagaagacctctgtgagattctgaaattcaatcttgaaaacgaaggttatgaagtggataccgccaactccgccgaagaggctctgaagatggatatcagcagttaccacctgattcttctggacgtgatgatgggggaaatctccggtttcaagatggcaaacatgctgaagaaagacaagaaaacagccagagtgcccatcatcttcatcacagccaaagataccgaaaacgatactgtaacaggcttcaatctgggagcggacgattatatctccaagcctttctccctgcgcgaagtgatcgcccgtgtgaaagccgtactgaggcgtaccgccacgatggagacggaaaaggcgcccgaacgcctgacttaccagtcactcgtgatcgacatcaccaagaagaaggtaagcatagatgacgaagaagtgcagttgacgaagaaagaatttgaaatactgcttctgctggtgcagaacaaaggacgcgtcttctcccgtgaagacattctggcacgcatctggagcgacgaagtatacgtactcgatcgtaccattgatgtgaatatcacccgtttacggaagaaaattggcgaatatggcaagtgcatcgttacccgcctgggatacggatactgctttgaagccgaataatcaagaagtatgaatctacctgtcaagcaaaaacatttcctctctttcagccggaagttattcctttcggtgatctcgctgtttctggtatttgccttttgtttcatcgcctaccagtatcaacgcgaaagagaatataaagtcgagttactcaacacacagctccagaactataacagccgcttgtacgaacggctgaacagtaatcccgccatcgaagaaacgactgaaaagtatatccgcgaccacgcattggaggacttgcgcgtcacactgatcgacttgcagggaaatgtgatctatgacagttatcagactaccgaccagcaactggagaaccatctcaaccgccccgaagttcagaaagccttgaaagacggaaccggttttgacgtacgccgcacctcggagaccaccgggctaccgtatttctattcggcaacccgctacggagattatatcatccgctcggcactgccatataatgtaagcctcatcaataatctgcaggcagacccgcattacttatggtttacggtcattgtgtcgctgttgctcatggtgatcttctacaaattcaccaacaaactgggaacttctatcagccagctccgcgagtttgccatgcgtgcagaccgtaacgaaccgatagagatggcgatgcagtccgcttttccgcataatgagctgggagagatttcgcagcacatcatccagatatacaagcgtctgcacgaaacgaaagaggcactctacatcgaacgcgagaaactgattacccatcttcagatttcgcatgaagggctgggcatattcaccaaagacaaaaaagagattctggtcaacaacctctttactcaatacagtaacctgatttcggactctaacctggaaacgacagaggaagtattcgccatcagcgaactgaaagacatcattcatttcatcaacaagaaccagcagcaacgctcgcggggaaaagacgaaaagcgtatgtccgtcacaatcaacaaaaacggacgcacctttatcgtggaatgtatcatctttcaggatgccagcttcgagatttcgatcaatgacgtcacgcaggaagaagagcaggtacgtctgaagcgccaattaacccagaacattgcccatgaactgaaaactcccgtaagcagtatccaaggttatctggaaacgattgtcaataacgagaatatctcacgtgacaagataaatacgttcctcgaacggtgctacgcacaaagcaatcgcctcagccggctgctacgcgacatatccgtactgacccgcatggacgaagccgccaacatgatagacatggaacgggtagacatcagcgtactggtagggaacatcatcaatgaagtttctctggaactggaagaaaagcacattagcatcgtggattcactaaagaagggtatccagatcaaaggcaattactctctgctctactccatcttccgtaacctgatggacaatgccatcgcatacgccggaaccaatattcagataaacatcaactgtttccgtgaagatgagaattactattatttcagcttcgcagatacgggcatcggtgtctctccggaacatctgaaccgccttttcgaacgtttctatcgggtggacaaagggcgttcacgcaaactcggcggaaccggtttagggcttgccatcgtaaagaatgccgtcatcatccacggaggaaacatttctgccaagaataatcaaggcggcggactggaatttgtcttcacgctggcgaaagagaaataaacagcttggtttttctttattcacagtgcagtcaaacaatcagccactctcccagattccgtttcgcggcatcaaaagacacaccgactttcaccagtcgcctgccatccacggtgtagggcaaaaggtaacctttttcatcaatctgcttcagagcttcttcggcggtgccggtgagtttaaattcgaacacatagatgtagtccgcagtctttactactgcgtcggcacgaccgatagcggtacggacttccgcttgcgtgaattgccccatgagtttgaagacgagatagaatacaacttgataatgacgttcagttttctcgttcagttcgtaaggaaaatcggcgaagaaacaggacagacgagtgaggaaagcttccgtttcgcccgtttccagttcatgcacaaatttcccgatataaaaggtggtatcggtggatgcgacaggagtatagaaaggggcgacaaaattgaggaaaccatatttcacctcttcgttaggaaaccccagcgtatatgtacgaaaacgttggtcgaacgactttatagtcaggtatccgctttgataaatcatcggaacaggattggagatattcgccctgtcgtcgctcaatgaagcagaagagacttcaataccgtccaattcgcgaaggtcaaaatttgtcttctttaggatctctaccagaaaagtaggcgttccgctggcaaaccaatagtcaccgaaacgcgacttagcaagggcattgagcacactgaaaggattgagcatgggagtaaatcctttctcaggagtgaagcggtaaccgtcatactggcgggtgagttgctctatagcttcgtcataatttgtttcagcctggagagctagttcttgcaattcaggtacaaaaacggtttcgatttccgtacgtgtcatgccgcaaagggtgttgtactcaaggtcgaagctgatatcattcaactggttaagcgtgctgaaaatgcccatctgcgcaaacttcgttactccggtgataaagacaaactgaagataagggtcagcatctttgagtacagtatagaaagcggtcagcgttttacggaagtcttcttgcaaatcaggtttatcgaatgtctgaagcatgggtttgtcatattcgtctacgagtacgaccacacggcgtccggtctgttcgtatgcacgtcggataatggtaatgaagcgtccggagtaggtcattgtgcctttatctactccatacatctcttcccaactttccagttgcagttcaagcattctttccaatcgttccctactgtcatatttctcagcattcaagcttaggtgcaacaccgggtattcgaaccagttctgctccaatttctcgatagcgagtccttcgaaaagttctttcttccccttgaaataagcttcaagcgtggaaagcaacaggctcttcccgaaacgccggggacgactgaggaaataaggcttccctttcgttacgagacgatagaccagttctgttttatcgacataaagatatccttccgagcgaagaaattcgaaactttgtatccctatcgggagcttacggagcgttttaacaggtgcgttcatatcagcttttattaaaaaataaccaatgctacgggcaaagataacaaattcgatgcagattccacccgaagggaagagattatttagccctattcacacaaagtcggctgtatcgataaaaaatacgaagccgcatatccagttttcaaaacttaccggaatatcggtatgttttttcacatagttttcatacctttgcttccgaaagtaagtttaaaccaaccaattgtcatgaaaacaaacataagccttatactcattctgtgccttcttcttggcgcctgtaaaaacgggaatgcttcaagtcaaagcaaaagcgaaacaccgcaagataccattaaggctattaagatgcccgccatcccgcaaatgatgacagcaccggaacaacgggccgactttctggccaagcattattgggacaatgtaaactttgccgacaccaactatatccaccatccggaagtaacggaacaagcgtgggcagattattgcgacttgctgaaccacgtaccgcttgaaacagcccaacaagccatgcgcaatgtaatcgaccggaccaatgtggacaagaaggtgtttacatatatcaccgacctggcggacaagtatctgtatgatcccaactcccccatgcgtaacgaagaattttatataccggtattggaagcaatgatagcctctcctgtattgaacgaaacagagaagatacgtccccaggcccgtcttaagctggctcagaaaaaccgtatcggaaccaaagcgctcaactttacttataccctggcctccggagcacaaggttcattatatcagttgaaagcggaatatcttctgttatttatcaataaccccggctgtcaggcatgcacagaaaccatagaaggtctgaaaaacgctcccatcatcaaccagcttttacaggaaaagaagttggtacttctctccatctaccccgatgaggaactggacgagtggaaaaagcatctgagcgaatttcccaatgaatggattaacggatatgacaagaagttcactatcaaagaagaacaggtctatgacttaaaggctatcccgactctatatctgttggataaagacaagactgtattgcttaaagatgccaccgcaccagccattgaagcatatctaatgcagcatcaatagttaacatgtagttccaatatcagttccaaccgttgaaacaaaatgtttctgccgctcggaactaaagtttcatccgcttgaaaccaaagtttcttcagtttgaaactaaagtttcctctgcttgaaactagagtttcatccgcttgaaaccgttggtttcaacgctttggaactttctaaagcaactatcaattagagtaacttgactgcatgaccggagtaacccaaccgcattagttgctccaattcacccgttctttcaagaagcattaactcatttattggctactaatagatgagttatcagcctttaatacctgatttctcaattattaatagttgatatgccaatctttaatagttgacgtatcagacgttaacatcctacaaatcaacctataacactacaaaacgtcacgtcatccgatgcaccggagtgagagcaaccatttgctctcatacctgccaccacacttgctaccacgcttgaaacagcgatgaataaagggatacgcaggaattgttagagcatgagagcaaaactgctgttattttctttttggtagaaacaaataaactatatatctttgtccccgcattggtttgcgactctcatcacgagggaagcgattaaaagggaatcaggtgtaaatcctgaacagtcccgctgctgtaagttccatagatatgttgcgagcaatctactcaaagccactggaaagaaaattccgggaaggcgcccgcaacaggaataagtcagaagacctgccatgtaaaatccgtttcactgctttcgaggaaaaagcgttgaatctaatgacccggacatccgtctatcatttcattcatcactctgattcagagaaagtatgtacaaactaatagactctgccaagtttattatgtgtgtccggtcgaagcgatttcgcccggacactttgatggacatattttatttacttaatatacaaaacatgaattgtaaaaagctattcaaaacgttattatttataataacaacgcttgttattgtgtcttgctcgaaagacgattgtgacctggaccacattgacaaactacaaggattaccagctctgaaagccggcactttccccgaagaggatttgacactcaatgtcggagaacaatatgtatatgcccctaaggcaagtagtccgctggatatatactatcaatggtatcagaatggagaagatatgtcgaccgccccttcattcacattcaacgccgaacatcccggccgttccaaagttattttagaactcagcaatgacttgggaaaagtgacattagaaaataaagtgatggttccgggagcggattactccaaaggatgtctgattatcaatgagggatggttcggacacggatccggaagtatttcattctataattatgagaagaacagcattgaacactggtgctataagaatcagaatttcggagatgtgctgggagttacctcacaatcggctactttgtggaatgggaagttgtatgtctgttcaaaagaagataatcagttggtggtgatggatcctaaaactctgtatgctgaaaatagctgtggcaaactagctaattatcaagcttatgagtttatcggtttgaatgacgattatggaataattactcatggaggatatttcagccgtatcaatttaaaaacgtttgaaacaattacactggtatcggtaggaaatacgtataccggaacaggtagcggaatcgcttataacggaaaactcatattaaatgtgaactcctccgggtggggaagtcctaaagtgtataccatagacattgcagaattatgctcacccgatctcaagcctacagacaaagtcgcattccaggaattagatattacaacctatggtggtactcgctttgtacaatgtaaagatggaaatatttatactgtagaaacgaccaaagacggtaaaaacaatctggtaagaatcaatgctgatttttctctggaaaaggttgcaatgcgtgacgattattctccctcctcgttcggtgcttacagagaagccagtttctgcggcactcctgaaggaatattctactacatcgcaggaggaaagatatacaaagccacttttgacgatcccgcccctgaggagacactgaccgaatacaccaaagaaggttacggattctatggcgcaggcatccgcgtcaatccaaagaccaacgaattactggccatgtacctgaccggagactatcagaaaaatcttctggtaagattcaacgccgccacaggagaaaagatatcagaaatagcatacgatggctattatttcccggctacattcatttttaactaataacaagactctgaaacaagatgaataaactatataccactttattaatagcctgccttgcagcaggttttaccgcctgtaacgacgacgattgcgaagatttgcacctcggcaatctggcacattatccgaacgtactgaaaggaactttcccgacagaaagccaagtgttggaattaggagaaacgttggagattactccggaactgcttaatccggaaggagccacctattcatggctggtcaatggaaaagagtattctaccgaaccgacctttagttacaaaatagacaatccatgtcgcgcggacctgtcatgtatcatcaagaataaatacggaaaagtagaaatgagcacaagtttcagctctaaccacaacttttccaaaggattcttctacgtagcagacggaacattcaatttctatgataccgaaaagaaaactgcttatcaagattgttatgcttctttaaatgcaggaaaaactttgggaattggtaactacgactctgcaaatatcattcacagcaacggaaagttctatctgcttgtgggcaccagcacatcgaaccgagatcatttctacattgtcgacgccaagactctttattacgaaaactccgctgtagtaggcgcaaacctaagcggtctgaccattctgaacgaacaatatggattagtgacaggagatggcatacgtcgtattgacctaaaatcacttaacaatgtcaggatcaagaatgagcgtctgctttgtttctataatagcataatctacaatggcaaagtgctgagcaatgacacttataaagatgagtccaaagtgaagtattacgatgtaaacgagctaatcgcagctaaagaaggagaagctcctgccgttacagagctagatatcattcaaaaacagaaaatcaattttgtactggctaaagacggtaatgtttatactcttgaatcggctgataacggatgtaatatcgtaaaaataaagaatgactttactttagaaaaagtctttgcaaacttccagccggccaagggaccgtatcattcaagtccgaccataggcatggtagcatccgaaacagagaatattatttatctggtatcgaccgacggagctatatataaatatattttaggcgattcagactctctcaaagcacctttcattgccgcagaatcaggagtttcaattactgctccattgcagctgaaccaacaaagcggagaactctatgtaacttataccgaagaacggaaagatgaatctaaaatcgtcgtttacagcaaagacggaaaagttctccacacagtagactgtggtgagagcgttccttcacaaatattattcaataactaaactaacatagaaaaatgaaaagatattggtatctgatggctatagcagccactcttttggcttcctgcaacaaagatgaggaagaaacggaaattcaaggattcaaagtgctggaatatcgtccggcaccagggcagtttatcaatgaaggcttcgactgccagacaatggaagaagcaaacgcttatgcagaagagcgcttcaacaagaaactctacgtctcactgggatctttcggcggatacatcaccattaaaatgccgaaagaaataaagaaccgcaaaggatacgacttcggtattatcggcaatcccttctccggaagttccgaaccgggcatcgtatgggtatccgaagacgctaatggcaacggaaaagcagacgacgtatggtacgagctgaaaggaagtgacgaaccggaacgcgactattccgtcacttaccacagaccggatgcagccggagatatcccttgggaagacagtaaaggagaaagcggagtcatcaagtatctccctcaatatcacgatcagatgtattatccgaactggattaaagaggactcctatacattgaaaggaagtatgctcgaagcacggacagagcaagaaggcggaatatggaaaaacaaggatttcggaaaaggatatgccgacaactggggaagcgacatggcaaaggatgacaacggcaactaccggtataatcagtttgacctggatgacgccgttgaccagaatggcaatcctgtaacgctggaacgtattcattttgtgaaagtacagagtgccattttgaagaatgtcgagtcgataggtgaagtgtcaaccgaggtggttggattcaaagctttttaaaaagctgttcaaagtcatggatttaccttcgctcctctcttgcaaaagacaaataaactatctatctttgtcgcgcattggtttgcaactctcatgcacgagggaagcaattaaaagggaatcaggtgaaagtcctgaacagtcccgctgctgtaagttcattttttggttgcgagcaatcgactttatagccactggaagggtattccgggaaggcgttcgcaacaggaacaagtcagaagacctaccatgcaaactcgtttcactgctttcgaggaaaaagcgatgagtctaatgaaccggacaatccgtccatcatttcattcaccattctgattcagagaaagtgtgtactaattaataaactctgccaagtttattatgatgtccggtcgaagtgagttcgcccggacatctttttacattatgaacagactgaaagaaaacaatgagaaggaatacttttattaaaaagatgagcgtactactctgctgtcaggctttgtccttatccctttttgcccaacaacaaaaagtggatacagcacatatctactccatccccgaaatcatggtatccgacccttatcagacgcgtgaagtccgttcagcctctcctctgcaggttttcaataaggacgaattaaagaatctgcaggccctgcaggtatcggatgcggtaaaacatttcgcaggagttaccgtgaaggactatggaggtatcggaggattaaaaaccgtctccatccgaagtctcggagcacagcacaccgctgtttcctatgatggcatcaccgtcagcgactgccagaccggacaagtagacatcggacgtttctccctaaacaacgttgaccgcctttcgctcaacaacggacaaagcgacaacatcttccagcctgcccgtttttttgcttctgccggcatactgaacatacagacactgactccgcacttcaaagaagacaagccgactaatatagccgccgaatttaagaccggttcatggggattagtaaatccttccctttttctggaacaacaactcaacaagaaatggagcatgaccgccaacggcgaatggatgtcttcggacggacattatccatttaccctgcgttacgggaatgatgccgatgttcaggtcagtaaagagaagcgccggaatacggatgtagaaaaccttcgggctgagataagcgctttcgccaatctctccgacaaagagcaatggagactgaaagcctattattaccagtcctcacgggggctgcccaatgccactaccttatattatgacttctcccgacaaaatctgcaggataagaacacctttatccaaagccagtacaagaaagagtttagcagaaaatgggtattccagacctctgccaagtggaactggagttatcagaactatcaggacccggatgctcttacctccgtcggaggaactgacaacagctattaccagcaagaatattacctgtccgcttccgctctataccggatatggaacaatctttctttctccttgtccaccgacggaagcatcaatacgatgaatgccaatttgcagaacttcgtctcccccacccgctattcatggctgacagcctttgccgggaaatacgtcaatgaatgggtgacgctgtccgcttctgctctggcaactgtcatcaacgagaaagctaaaaacggaggtagtgccggcaaccaccggaagctgtctcccaatgtcagcatctcgctaaagccgtttcataatgaagaactgcggttccgtttcttctacaaagatatcttccgtctgcccagcttcaatgatttatattacgacaaggccggaaacatcaatctgaagccggaaagtgctactcaatataatataggtattacttatagtaaagccatcaacaactttataccttatctttcggccaccgtagacgcctaccataataaagtgaccgacaagattgtagccactcctaccaagaacttattcatctggagtatggtcaatctgggcaaagtggatatcaaggggatagatgcaactgccagcctcagcctccagcctctggataaactacggatcaacctttccggaaactatacttaccaacgggcactggacgttaccaactccaatcccaactcaccggaaggtaaagtgtacaagcatcagatagcctataccccgcgcgtctccgcttccggacaagccggaatagaaactccatggctcaatctttcctattcattccttttctccggaaaacggtatatgttaggacaaaacatcagcgacaaccgcctggacagctacagtgatcacagcatctctgcctacagagatttcaaaatacagaaagttacagcatcactcaacctggaagtgctgaatctgatgaacaggaattatgagatcgttaagaatttccccatgccgggaagatcggtaagagtgacgataggagtcaggtattaggtaataggtattaagtaataagtattaggtatgcagaaaggtcttttatataatatgttgctacggttggggaagtgtttttttcttttcccactcttctttatcgcttgcgatgatctggaagataagccaagtattgtacccgaaagcaatggggatgtattcgaaaccggaacagcggagatgtacatattaagcgaaggactgttcaatcagaataatagttcgctcgctcgttattctttcaatcggcaaagatgtacgaacaactactttagtgcaaacaatcagcggagactgggagatacagccaatgacatagcgatctatggaaataagatttatgtagtagtcaatgtgtcgagcaccgtagaggtgattgacttccctacgggcaaatccatccggcagatcagtatgttgcgcgacaatggcagttcacgtcagccccgcgcgatagcgtttgataaggataaggcatatgtatgttcctatgacggaacagtcgcaaggattgacaccacttctctggaaatcgaagagattgtcacagtcggaagaaatgcggaagatatctgcgtacaaaacgggaaattgtatgtatccaattccggcggactggattattcgggaccgggcgtagacactacagtatcagtgattgacataacgactttcaaggagaccaagaaaatagaagtcggaccgaatccgggaaaaatacttccggggctggaagaagccgtgtatgtagtcacacggggaactgacattgaagccggagactatcatctggtcaaaatcgacagccggacggatgcggtcgccactacgtatgatgaaaaagtactgagctttgccatcgacggccccatcgcttatctatatacttacgactatcagactaaagattccgccatcaaagtatttgacctgaatgcaggaaccgtcatacgggataactttatcacagacggaacggctatccaaacgcctttcagcattcaactgaatccattcagcgggaatgtgtatatcacggaggcttacaattatacagtcaaaggagatgtcctttgcttcaaccaacaagggcaacttcaatatcggctgaatgatatcggcttaaatcctaatacagtagtcttcagcgacaaggcttcacaaaacgaggcaggagatacaccggaaaatccgaatgcaccttccgcctttgccaacaaagtattcgaatacatccctgcccccggacagttcattaatacaacaacctccgcctacgaagacggcttctctgccggacaggttctggaacgtgcaacagagaaattaaagaagaagtctgttatttctttaggtggattcgggggaacgattacagtcggattccatcagtcaatccgtaatagtaaaggcgaatatgacttcagaattttaggcaatgcctcatacaatcagaataccggtacgggagctttgggaggaagtgccgaaccgggcattgtcttagtctcaaaagatgaaaatggcaatggattgccggacgatgaatggtatgaactggcaggaagcgaatatgggaaagatacggaaacccgtaattacgaaataacctattatcgtcctcaacctgccaatggtgatgtccgctggaccgacaatcaaggaggagaagggttcgtctatcgcaacagttaccatcaacaggattcctactatcccaattggatagaagaagatgaaattacttttcgcggaacacgcttgaaagacaatgcaataaatgaaggaggtacttgggtagggtactgttatccttggggatatgcggataatcatcccaacagatcggagttcagccaattcaaaatagactgggctgttgatcaaaacgggaatcacgtagaattagacaaaattgattttgtgaaaatatatacagctgtcaatcaaaacgtaggttggatgggagaaatttccacggaagtaatgacagtagaggatttacatttcgagaactaatcaataaaacaattaataatttaaatgaaagcaaaaatgaaaaagttatctttattcttactggtatcagtattcgctttttgtggatgtagtgatgagaatgatgaagtaaaaggtggtgatgataataaaggaggagaaaatgagaaaaaagaagtggttgtcagcttcgaaaaccaattaacggaatcggagagtgaatttacttcaactagtaccgaagtttcaggatactattttaaagacacattcactgatcctgaaagttatgtaaccttcgatcattattactcggactggggacaagggtatagcttcgcaggcttcacttacaccaacaaaactagccacttccaaaattgtcaacccaactgtggaaatataaaaaccggggaagtatatttaggtgtctacagtgatgaaaataccacagcctctatgacaattatagactctcaatattccattaaaggtctatggataaccactagtaaaaatgcctacatcggtatgacggaaggtgacagttacgcaagacctttcaaaaaaggagattggtatgaggttactgcgacaggatacgacaataaagggaaaaaaattgctgaaacaaaaattaaacttgccgattacaaaactgatactgataaaccagtaaatacatggatatggtttgatttaacccctcttaaagatgcttctaaaatcacacttattcctagttcttcagactcgggcgagtttggaatgaatactggtaaatatttctgcattgatgaccttactctcatcgaaaaataaaaatcaggtatttattgtttgactcaaacagaggctctaattaccacaaacagaccctccgtttgagccaaacagaccgttcaattgcaccaaacagaccgttggtttatcctcaatcaacctctcgattacaaacgatcgaccgcataagtccactcaatcaaccgcatgacttgaaagaaggtgcatagaaactctaataagcatatcactccactttggataacagtactaaatgatagcaaacttgacttttaaacctcatctcttagattctacacattcccttctagattttctctccgtcccatctactctttccatgtccctttaaaaacaattacgcatccctatccttacaaaaagtcatcaaaaacttgtccatctcatacatattcagtattttagtcggataaaaatataaaatcaaggacaatgaaattaccttttgctgaatcatggaaaatcaagatggtagaacccatcagaaaaagtacccgcgaagaacgcgagcaatggattaaagaagcacattataacgtctttcaactcaaatcagagcaagtttatattgatcttatcaccgactccggaacgggagccatgagcgaccgccaatgggcaggcatgatgctgggtgatgaaagttatgccggtgccacctccttcttcaaactaaaagataccattacaagaataacaggattcgaatacatcattcctacccatcaaggacgggcagcagaaaatgttcttttctcttatctggtacatgaaggcaatatagtgcccggcaactcgcatttcgataccaccaaaggacatatcgaaggacggcacgccatcgcactggactgtacgattgacgaagcaaagaatactcaactggaaattcccttcaaaggaaatgtagaccctgccaaattagagaaagcactaagcgaatatgccgaccgcattccttttatcattgttaccattaccaacaataccgcaggaggtcaacctgtatccatgcaaaacctgcgtgaagtacgtgctatcgccgataaatacaacaaacctgtacttttcgactccgcccgctttgcagagaatgcctacttcatcaagatgcgtgaaaaaggttatcaagacaaatcaatcaaagaaatcacccgtgaaatgttcgatcttgccgacggtatgacaatgagtgccaagaaagacggcatagtcaacatgggcggtttcattgccacccgacgcaaagaatggtatgaaggtgccaaaggtttctgcgtgcaatacgaagggtacttaacctacggcggcatgaacggacgggacatgaacgccctcgctatcggtcttgacgaaaatacagaatttgataatctggaaacacgtatcaaacaggtagaatacctcgcccagaaactggacgaatacgaaatcccctatcaacgtcctgccggcggccatgctattttcgtcgatgcttccaaagtgctgacacatgtcccgaaagaagaatttcccgcacagacattaaccgtcgaactttatctggaggcaggcatacgcggctgcgagattggttacatccttgccgaccgtgaccctatcactcacgaaaatcgctttaacggccttgatttacttcgccttgccatccctcgcagggtatatacggacaatcacatgaacgtaatagctgccgccctcagaaacgtattcgaacggagagaaacgatcacccgtggtgtgcgcatcgcttgggaagcccccttgatgcggcattttaccgttcagttagaacgattgtctgtatagcaggtagacaagacaaatggcaatgaccttgtaagcaagcagaaaattctttataaacaaaatcaatcctcaagtgtttatattataatcaaacttaatacgtaaagttatggcagaagattataaattaatcgataatgaggagaaacatcggtatgaatttcagatcgatgacaagatagccaagatagactatatcaaatcaaataatggagaaatctatcttgtacataccgaagtccccgcttcccttggaggaagaggagtcggttcacagcttgcagaaaagacattggcggatatcgaacgacaaggtttacgcttagttccactttgtccgtttgtagccggatacattcataaacacccggaatggaagagaattgttatgcgtggcattcatattaaataagtatagatatgggaaaaaaagttgaatataccaatggcgaactaaccattgtatggcagccggaaatgtgccagcatgcaggaatctgtgtaaaaatgttacccaatgtttaccacccgaaagagaggccgtgggtacaaatcgagaatgctacaacggaagagctaattgcacaaatcagtaaatgtccgtcaggagcattaagttacagactgaacaagaaagataagtaaccaaagataagcggtgaataattggtggactattccactcattattcaccgcttatcaatatgcaaatatgcttcaaatagtgacagtccacgtcaaaacaaagtccggacaaatacgataaccgacggtgaacaattgctgccgttccgttgcatactcccgcacctggaataccccttcgctctgaggaataaaatgtgataaacaaagtttccgaagatcagcgtcagcattttccattgatttgaagattgtctcctttgccgaccaatgcaacagcatactccaagtctcatctccctgataaggttctactcgctcgtcggaacggataaaacgatcgtacactcttttcacacgctgtccatattgctcaatatcaatgcctacaggagctacggaactaagtatcacagctacatacccctttgtatgagagatactgataaaagaagaattgtctgtcaaatgcggctttccttccgatgaatatcctatctctttatcttcctgcaacatagaatatagcagcacacggacagacaaccattccagtttccttcggtccgaagtaaaacgctgcatttcctgctcacaagaaactcttcgggcatcgggcagaagactaaacagtgtatccaaagattcctccatcttccagacaacccactgcatatcaaccgttttatgttgcagaaataatcccatcgtttttggtttataatttcttctccgattatagtttctccgcccgaacaggtcttatctactcatcactccttactctccgactcatccatctccttcggaagaatcgtgaacttaaccttcagaatacggcggctatccatctccagcacctcaaactcataattgtgataagtcaccttctcatgcaatgccggaaactcaccttttatttcgagcagcatgcctgccagcgtatcagcgtcacctactaccttttcaaattcatcttcatcgactttcgcaatcttatagaagtcagtcaactgtgtctttgcttcaaatatccatgtatgatcgttcagcacaacatatgtgcgctcttcatcgtcatattcatcatgaatctcgcctacgatttcttcgataatatcctccattgtcaccagtccggaagtacctccaaactcatccaccacaatggcaatatgtatcttattcgcttgaaaatcacgaagcagatcatcaatcatcttcgtctccggcacaaaataagcagggcggatcaatgattgccaacggaaattatctcccttattgacatgtggcagaaggtccttgatatatagcacacccttgatattatcccgcgaaccggaataaatagggatacgtgaataagcattttcaatgatacactgcatcacttctttgaaaggggtacggacatccagatcgaccatatcaagacgagatgtcatcacctctttcacagtctcaccaccgaagcggataattccttccaaaatattattttcctcagaaatttcagctttgtccgtcaattccaatgcatgagaaagttcatccacagaaatattatgattcttcttggcaaagtgcttattcagaaaagtggtagaacgcaccagcatagaagcaaccggatgaaacagtttttccagaaaatagatgcccggagcggagaaacggcaaaatgccaatgtcttttgtgctgaataaatcttcggcatgatctctccaaacaacaataacaggaaagtcaggattacagtcagtataatgaactccgccaagggagaatgaaacacgaatacattcatgaagaagaagttgcagagcatgataatggtcacattcacaaaattgttagtgatcagtatcgtagccagaagccgttcggaatctccaaggagtgcgctgatcttttcgtcagcaggatgattgtgttcgtcaatatcattcaagtccgaaggagagagtgagaaaaaagctatttcagaagccgaagcaaagccggaagcaagcaggagcacacctgccagtactatggcgataatagcagagattgaaggagtgtttacggtaataccgttgaaaatttcagccaattggcttaaataaccatctgagtccaaagagtatgtattttagttaaacaaaagataatgtgccaatcagccatcagcctattgacacattatcacagtatctaaaacggcaagtcatctgccggattatcttgtatcggctgtgcctgtgacggctgcgcctgttgttgcggctgttgcatctgctgcggctgctgagcctgtgttgcagatggttgaggagctcccgcacctgtattagcccctttcggagacaacatttccatattgtccacaaaaatctcagtgatataacgcatagcgcccgactgatcactatatgaacgggttcttattttcccctccagatacagtttgtcacctttgtgcacatatttgtccacaatctcagccaaacggttggatgcaacaatattatgccattccgttctttcgggaatctgggttccattggccaatgtatagccacgatcagtagtagccaaagggaaagttgccactgccgaacctgtatcgaaatatttcaccctaggatcttgtcctacgtttcctatcaatatcactttatttactgacatacatgtatcaagtttatgattctattatttaaatctgctgccaaaattaaacagaataacaatagtatgcaagtattttaagtaataagtaggtaataagtaataggtaataggtattaaccattcggtttatagcgcagcttattacctattacttattacctattacttattacctgaattaaagtctgcaccaacttggaaatcgcatacttgtccaattcctccaatcgtattctctgaaagttagcgaaggacttcgtgtcttcgggcaaagccacttcatacaggttggcatagatgacccgatgtgacaacacgtgcttcacaccccggcagactaagcgtatcaccggattctcacccgatgctattaatgacctaaattccggcaatgcaagaaactcctcttcggacaaagcaaccggagtttctatcagtggcagttcaaacaagttcttccatatatcgtttgccgtccgcttatttatataggtatgcgcgcccgcacgtacatagatataattaaagtaacggttcgtcgtctttgtcttgtgttgtttcaccggaagctgagtcacccttcctgttgaaagtgccgaacaactatccgccaacgggcaaaacaaacaatcgggtgactgtggagtacactgtatcgctccgaagtccataataccctgattataaagagccggctgtttcttatccagcatttcatccgccagagcagcaaacagtttctttccttccgtcgagtcaatcggagtatcaatgccgaaataacgggaaagtacccgatacacatttccgtctaccaccgcataaggcataccgtaggcaaaagaacagatagctgccgccgtatactcccctactcctttcagcgccagcacttcggggtatgtttccggaaaaactccattcatacttttggccgcagcatgcaggttgcgggcacgagaataatatcccagtccctgccagtatttcatcacctcatcctcgtcagcgtctgccaatgccttcacatcaggaaaacgtttgataaaccggagaaagtaatcatatccctgcgccacccgtgtctgctggagaataatctccgatatccagatccgatacgggtccgacgattctctccaaggcaaatcacgcttgtattctttataccattcaactatagcctcactaaaaatattcattcctgatttcgatctatcatctaacatttatctcgtatatactatccaaaagcagtacaaaagtaactcttttgtctctaagaaaacttaatgcctccacttttttagaaaaatgtgcagaatatatttttttaggagaccaaaaagctatatatttgcagtccaaaaaattagcaagaacctagtaataatattttttttaaggaaaaatgactaaagcagatattgtaaacgagattacaaagaaaaccggtattgataagacaacagttcttacaacagttgaagcatttatggaagctgttaaagactcattgtctaacgatgagaatgtataccttcgcgggtttggtagcttcgtagttaagaaaagagctcaaaagacagctcgtaatatttctaagaatactactatcatcattccagagcacaacattccggccttcaaaccggctaagacatttacaatttcagtaaagaaataataaacaagagtattaacccataaaatgtgaagctatgccaagcggaaaaaagaaaaaaagacataaaatgtctacgcacaagcgtaaaaaaagactaagaaagaacagacataaaagcaaaaaataatttttaagtctgatcaaacagaataaagaacaaacttgcgaagctaaatgtctttcaagtttgttctttgtttaagtagctaaccctaaatgaacattttgtcaaaaaagtt

SEQ ID NO: 4566 - DNA, 65999 bp, Unknown
  gut microbiota DNA sequence
tgtttagatgacataatgattatttgaacaaggctaaatttgcacaggctgacataaatgtgacattatgatagtttgatgatatatatttatcttcataactatcataatgtatttacaatagttttcaaatttattttgaataattgttttgtatttataaatatgtgcttatatttgcaaaatagcactaagcgaaaataagcgacttactaattcttataataataaagagtgtttatgaaaagaaaattaatgctgttattggcctgcttgctggcaagcataggtctagtgattgcccaaacacctaaaaaggtgacaggtgtcgtcatttctgaggaagatgatcagcctgttgtgggagcatccgtattagtgaaaggtacaacgatgggaacagtcaccgatatcgatggtaagtttaccataaacgatgtaccaagttctgctagaactttgaagattagctatatcggattgaaaactcaggaggtccccataaaagcaggaacgataagaattctgatgaaaccagatgcagaagttctggaggaagtagtggtaaccggcatgcaaaaaatggacaaacgcctttttactggtgcaactcaacaattaacagctgataatgtaaaattggatggtctccctgatattagccgtggacttgaagggcgtgctgcgggtgtgtcagtccagaacgtatccggtacgtttggtactgctcctaaaattcgtgtacgtggtgctacctccatttatggtagctccaaaccattatgggtggtggatggagttattatggaagatgctattgatgtgggacctgatgatttatcttctggtgatgctgaaactctgattagttcggctattgctggtttaaattccgatgatattgagagctttcagattttgaaagacggttcagcaacctcaatctatggtgcacgtgcaatggcaggtgtaatcgttgttactacaaagaaaggtaaagccggagtcagcaaaattaattatacgggtgagtttactacgcgtatggtgccctcatacaaagagttcaatattatgaattctcaggagcaaatgggaatatataaagaattggagcaaaaaggttggttgaatagtgctgatttatttcgtgcaaagaattcaggtgtgtacggacgtatgtataaactgatcgaccagtttaatgaaacgaatggtcaatttgggctgatgaatactttagaagcacgtaatgcttatttgaccgaagccgaaatgcgtaataccgactggtttgatgtattattctcaaataatatttcacagaatcactctgtaagtattacttcaggttctgataaatcatctttttatgcgtcattgagtgccatgcttgatccgggatggtataagcagagtgaagtgaaacgttatacagccaatttgaatacgacttataatatcttaaagaacctaagcataaatttgatatcaagtgcttcttaccgtaaacagaatgcaccaggtaccatgaactcatcattggacgttgcggcaggtcaggttacacgtgattttgatatcaacccctattcatacgcactgaatacttcacgtacattagatcctaatacagattatgtggctaattatgctccatttaatattctccgtgaattggacaataattttattgagttgaatgttgttgatgtaaagttccagggggagttgaaatggaaggtgttgcagggcctggaagtcagtgcgctgggtgctgtgcgttatcaatcatcatcacaagaacataatataatggatgattctaatcaagcaattgcttatcgtacggggttggacgatgctactattcgtgatgaaaacgactggttgtataagaatccagataacccatatgcattacctatttcgattcttcctgaaggaggtatttatcagcgtcaagatcgtaagatgttgggactggatttccgtggtactgtatcctggaatcatctatttgcagaaaagcatataactaatctttttgcaggaatggaagtaaatgatcttcaacgctctaactcttcattccaaggatggggtatgcaatattctatgggtgagattccatcatatgtttatcagtactttaagaaaggtattgagactggagaaaagtattattctatggggcatactagatatcgtagtgtagctacatttgcaaatgctacttattcgtatgacgggcgttatacgttgaatggtactttccgctatgaaggaactaatagaatgggacgtagccgttctgctcgttggctgccaacgtggaatctttctgcagcgtggaatgttcatgaagagaaattcttccaatcacttcaaccaacgctttcaaatttgacatttaaggcatcttactcattgacagctgatcgtggtccggctgatgtaacaaattcacaagctattattaagagttattcaccttatcgtcctttcactgatattcaagaaacgggtcttcatatagtggatttggaaaatagtgaattaacgtatgaaaagaagcatgaattgaatataggagtggatgtaggttttattaataatcgcattaatctttcagctgactggtacacgcgcaataactatgacctgattgggttgattccaacacaaggagtgggaggtactatttataaatatgccaatgtagctacaatgaagtcacatggtattgaatttaccctttcaaccagcaatattaaaacaaaagacttctcatggaattctgattttattttttctcatgctaagaatgaagttactgatttgcgaggacgtactcgtatgatggaacttgtttcgggaaatggatttgcacgtgaaggatatcctgtgcgcgggcttttctccattccttttgcaggtttggatgaaaaaggtattcctatgttcgatatcaatggaaatataacatcgactgatattaatttccaggaacgtgagaagttagattatttgaaatatgaaggtccgacagatcctacaataactggtagtttcggtaacgtttttgcatataaagggtttaaactcaatgtattcatgacttattcatttggtaatgttgttcgtttgaatccatattttaattataaatattccgatttgagtgctatgcctcgtgaattcaagaatcgttggacgctttctggggatgaggcaaagactaatattcctgcaatcttgagtaatccgcaatatgaagcaaaccgaacattgtataaagcttacaatgcttacaattattctacagagcgaattgcaaaaggtgattttatccgtatgaaagaaatctcactttcttatgagtttcctaagagctggatttctgctgcgaagatttccaatctttctttgaagttacaggcaactaatttattccttatttatgcagataagaaattgaatggtcaagatcctgaattctttaatactggtggtgtagcttcaccggtgccacgtcagtttacattaactctgcgtttaggattgtaagagaatgattttaataataaaaaaaaagattaaagatgagacgaaatcaattatatattccattgttcatcgcaacgcttgctattgtcggtagctcttgtaatgattttcttgacgaattaccagataaccggacggagctgaattctgagcaaaaaatagctaaaatgcttgtttctgcttatccggaaggatctgcgaatgaactgtttgaactttatagtgataataccgacgataacagtgccagatattcttattataagttatctgaggaagagtgctataactggaaagatacccaggaagaatatcaggatacgcctacaaatctttgggaaacccattatatagctattgcttctgctaacatggctttggaagagattgagaaacggggaaatccggaatcgttgatgccgcagcgaggagaggctcttgtttgtcgggcgtacaatcattttgtattagcaaatattttttgtaatgcttataatactcatgcatcacaggaattaggtattccttatatgactaaagttgaaacaactgtgcaaccacaatacgggcggggtactttgcaggagacttatgagaagattgagaaggacttattagatggtatggctcttatttccgatgatagttattctgtgccgaaatatcatttcacaaggaaagctgcatatgcttttgctgcacgtttctatctttattatatgaagcctgacttttctaattgtgatgaggtgataaaatatgcagatcgtgtgttgggaagtgatcctgctgccgaattacgggattgggaagcgttgggaaaactctctgctaatgataatgtacagcccgacgcatatattgcttctacaagtaaggctaacttgttgataggtagtaccgtatctaactggggtattattctgagtaattacatgacaggaaaacgttatctacataataagttaattgcttcttacgaaacatcacgttcttccggattatggggtatccctgaccgcatgtatatgcagccttttacaacatcgggctatgaatgcagtatgttgagaaagggcggttattatgctggtgactacctgtattatatgcctgtgattttctctacagacgagactttgctttgcagggctgaggcttatacgctgaaaaagaactatccaatggctgctgcagatcttactacatgggagaaagcatatacttctaataagcaaactttaactccggggatgataaatgagtattatgataagatggattattacaatccgacacaaaatccgactcccaagaaaaagcttcagcctgattttactattgaatcaggtatacaggagaactttattcactgcattctgcatatgagacgtattgctactttgcacgaaggtctgcgctggccggatattaaacgttatggaattgttatctatcgccgttctattgctaataacaatatagtcgtaacagatgaaatgccggtaaatgacgcaagacgtgctatgcaaattcctaagagtgtagttctggcaggaatgcaacccaatccacgtactgaaaattaaaaggaggaaataatatgaagaaatattatatttatatactaacggctgttttgcccattctttggggagcctgtaataatggcgatgatattgacaccaagcatagtattttttcaacagagccaatggaacataatggttttgatgaatggttgcttgctaattatacatatccgtataacgttgatttcaagtatcgtatgcaagatattgaaagtgatcacaaatataatctggtaccggcggattacgataaatcggttgctttggccaagattatcaagcatgtatggatggaggcatatactgaacttgccggaccggcttttcttcggtcttatgtgccaaaaacttttcacttgataggttctccggcttatgatagcagtggtacgaaggtgttgggtactgccgagggaggaaagaagataacattgtacgaagtgaacagtctggactttgagaatgtcgatatcgaagttttgaatgagtattactttaagacgatgcaccatgaatttgcacatatcctgcatcagaagcgtaattatgacccatcgtttgatcgcattaccgaaggaaaatatgttggttccgactggtatttctatgttgctgaaaatggaaattcatatttgcgagaggatgcggatgcatggccggaaggatttgtgacggcatatgcgatgagtgaggcaagagaagattttgtagagaatatcgccatgtatgttactcacgatcaggcttactgggataatatgctgaaggttgccggaactgccggagcggctattattaatcagaagtttactattgtatacaattatatgcttgaaacttggggtattaatttagatgatttgcgtgagattgtgttaaggcgtcagcaagaaattccagagctggatttaagtactattgaataaaacaggaagattatgaaaaagaatataatgatttatttgttgatggctcttgtatgctttggtttgcaatcctgtcttttccaggaagaggattattttgatgattcttcagcgaaccgtgcaacagaggaagtgaagcaatatagtgagctattagaatcggcatctaatggttggagaatggaatattacataggtcaggactatgctttgggaggcataactcttctgtgcaagtttgatggtcagcgagttacaatggcatctcaaggatacgaaggcgatgagactctttcatctctttataaggttgtatcggaggaagctacaatgctaacattcgacacttataatgcttttattcatgcatatgccaagccacaaggcggcggttccaaccccaatgccaacctgcaaggagattacgagtttattataaaggaagcttcagccgagaaaattgtaatgcagggcaaaaagtatggaaatacgatagtaatgtatgcgcttccggatgatttgaactgggaggcatatataaactctgtgaatgatgtagaagagaatgctttctttatacaatatcagttgttggttgatggaaatttagttggtatgacgcagcgaagtaattatacttttgttatagcctataatgatggtggtaacattgtacaagagcaatctcctttcctttttacaaccgatggctttcgtttccgggaaccagtttcactggcaggagtaactgtgcaaaattttgtgtgggacccttcctccgagctttttacttgtactgacgagggggcaactaacgttaaaatgaaaggaatttatccggagggatatattaaatataatgattatctaggtaattatactcttacctgcaagatgtataaagataataatttgacagacgaagaattaccaatatctattatggaggatgtagaaaataagagttatattctcaggggactaattggtgatatagtgctcgattatgatagaggtgaaggaattatgtcctttaagactcaaaaggtaggttatatatcaggatattatttgggatgtactacatattgttatgccatgggattttatcctacatatattagttatcaggcaggtctgatgtttggttttgtggcaaatgtacaacagtctccgtttggatttacatttgaggatgatggggtattcgaagcagtaggtggtgcaaaagctgattatatggccttcgaccgctattcggcacctgattatagtcaaagttcatatgttcaaggggtggcacgtatgtatggagagatggtctttatgaaagttgaggaataaataaaaaactagattatgaaaaatatactgaatttatacttaataatattctgcttattttttgttgcaggatgttcttcagatgacgatgctgccactgtaaaattgacaattataaaatcagatttggatatgaaagctagtggtggcactggaactgtcgaatttgcagcaactggaactgtcacggctacggtgaatgccgattggtgtcaggtaatcgaagttgcagatcataaagtttccatttctgtagatgctaatacaggttatccggggcgtagcgcacaaatcgttttaactgatggtgtgagtacgcagcaagcaaccatactgcaggaaggagctatttggaaatataatagagatgctacctatttcacattgacagatgctgcagaggaggtccctgttgaaatgtcgagtaatttgcctattcaggtatctattccagcagatgcttctcaatggttatcctatgaaatgacgagtgatggatttaagtttattgcaaaagagaatctcactggtaaaattcgttcggccattgtaaaagtgactactggcattcgtgaaattgaatatgctttattgcagtacgatattgatgacttattgggacaatggacaggtgttgtgaaagtcgttgctacagcatttggtattaatcaagttctttcattagaggaaaatactcaaattgttaaaaatccgggtggtaatggctatatattccagctaccaatgacaaggctgttgggagcaacgattgttttagcggtcacctatcaagatggagctttagctataaccactccacagcagcaaaattatgctttgtctgatgggcaaggaggagtgatgtacggctcaataataactaaaactgatgatggtttgtatttacagggaaaaattattctttctcctgtattaatgaatgatgggcaggttgcgttagcttatattacagatgcatatatgtcaatgggattatttaagggaagagttccgtctcctgcaaattatgcaggactttctattgattttcctgctattttgatgcaatatgctgaataatattttgcatgaaatactatttttatatagtggtttaactgtttgttatgagaagaacttgcattaattgatcctaagagctattatcgtaaggtagtagctcttaatatttaaatatttatttaataatctttatattacgcatcaatccaccatacttagcccttttcactgcactacctttgaaaatggttttatattgctcctcactcagcgaatgccaatcatccttcctcatacttaacaaagaaggagacggttgaaattcggctgtccggcaaggagtggcaaagcgattccaagggcaagctttcaggcattcgtcacagccatatattttattacccatttttttgcctacattgagcgaaagttccccacgatactcaatggtaagataagaaagacatctctcggaattgagcctgaaaggggcttccagcgcttttgtcgggcaggcatccaggcaacgtgtacacgaaccgcattgatttcgttgtggagagtcataattgtcagcttccctatcaagaataatttcccctaagaagaagcaggagccggcgtgaggaatgatgagatgtgtattctttcctatccatcccaagccggtacgccatgcccaataacgttcgagtatgggagcggtatcacagaatatgcggccttgaagcggagaagcggaggtttgggatactggggcttggggtgctgaggcgtagttttcagtatatgtgccgatattgtttgtcgaggcgatagtactgtctgtttcttcggagaatgaaacttctttttctataaactcaaaaagttccttcaatttccccttcatcacatcgtgataatctttcccgtaggcataccatgcaatctgatactcaccttcgggaagtttttttgccggataatagtttagcgcaacgctgatcaccgtacgtgccccttccaccaacaagcgcggatcgagccgtttatcctcataattctgcatatacgccatctctgcctggcaaccgtccgccagccattgacggaaggcggtagccacagtttcatccacagcttcggcaggcgccagtccgcaggcggaaaagccgaggcgtagtgcttcggctttaattcggtctgaggagaggagcttttccattaaaataccttgaattcatagccctccgctttcagaaattcgatggcacgggggagggcatattgcagattcccgttgttccacgatttcagagagtcgtggaaggtgatgatggaaccgttgcgtacgtagcgttttacgttattcagtacctgttccgggcgcattcgcttactgtagtcacgggttacgaggtcccacataatgatacggtaatggtggcgaagagtgtaatattgccggaatcccatgtgcccatgtggagggcggaataggtccgagtggataatttcgtctacccgtctggtgttggccagataatccggattggaatattcaaagccgcggatgtggttgaaagtatggttgccgatgcggtgtccgtgttctaccaccatccggtattcgtccgggtgtttgcggatattgtcgcctaccatgaagaaggtagctttaatatcgtgtttcttcagtagctccagtacccaaggggtaacttccgggatagggccatcgtcaaaagtcaggtagactgcccgttcgtttgggtccatccggaagatggcttgtggatacagcgctcggaagaaccaaggtggttgttctataaacataagagtctttattaataagtaacaggtaataagtaataagtaataaccgtgcggcttatggcgcagcttattacttattacttaatacttattacttagtttttatttccctttcattctcgcaacatactcattgtatagctggtcgagttgttccgagtaatgtttagccaattcttctgatttgtatttctccatcaggcgtacttctgcgtcaagcagtcctgcgttgtacatgaagttttcgctggcgatagaaagttggtaatcagtcaggctgagataccagatcatgtattcgagagacttgttggcaagttcgtcgatgatcttgttcgctttttcgttttgtcccagctggtagtaggcttccgccatttggaaggcgccgtttgcccagtcatacggtacgttgtatgacgggatcatcttctcggcgtagtcgagtgcggcgagtgccttgtcttttttgccttccttgatgagttgtcctacgagctgtgtgaagatgcgccggtgtgtgtagcacatacgcattacgttttcgtcgatgtagatgcccggtttctcgatgccgccgaacttgaacttgttcatcaggttgtcgtacatcttttcgctgtcgatcttgctgttcagcttgtctgtatcgaacggagtgaagcggtatgccagaccttcctgcgtgaagtggttgtccatgccgaggtggttttcactgcctacggtgatagccatgtagatgggacgttcccagttggcgttggcaagcatttcgagcatcatcagttcgctcttgtagagggcgcgtttcgggttgccgttggcgtctctcagcaagatggtcatgtattcggggatggagtcgcccagcgcttccggtattttcatgccggaacggcggacagcttctttgtcgatcttcattacgatgctgtcggtagggatgacgcgcagtccttccttatccgaacgaacccagtatttgaggatattcttcagttcatacgggttttctccgaactgttctttcagttcgttcatcgcttccggatttccgttttcgagcgcgctgtctgcctgtgcatacatctggtcgatattcttctttacttccggacggatggggatgtattcgttctggccttcgacgtattccacacggtcccaagtgatcgggagtgacggagagtcgtaggcgggacgtttcatctggtcgatgtaccagtcggtttgcaggtaactgaggttacaggtacgtgcatcggtacggaaaccttctgtctcctgattgtaccacaacgggaaagtatcgttgtcaccattggtgaagatgatcggatttccttcttcctgcaaggtcatcagatagttctgaccgaagtcacgggcaacaaagcgtccgctacggtcgtggtcgtcccatgtctgtccggccatttggatggggacaagcagacagagtactgatgcgagagcggcagccggaacttctttcatcttgcagtaatcgcgtaacatacggatgatacctgcgactcccatacctacccagatggcgaaggcgtagaacgaaccggcatacgcatagtcacgttcacgcggctgcgcaggtgtctggttaaggtagagcacaatggcgatacctgtcataaagaacaggaagaacaccacccagaattgctggataccccgctggctgtggtatgcttgccagaagagtccgatcaggccgagcagcagcggcaggcagtagaatacgttgtgtcctttgttgtttttgaggtcctgcggaagcaattcctggttgcccaccagcagattgtcgataaatgggattccggtgatccagttaccgtgttctatttctccgctgctctgaatgtcgttctgccgtccggcaaagttccacataaagtagcgccagtacatgaagttgagctggtaggagaagaagaacttgatgttttcccattggttcggtacgttcaccatcaccatttcgccgcattggtcgtatgggacgtcatgccccttgatgtctacccactgcttgtagagtgaggagtgcgcggagctgtacatacgggggaaaagcatattttgcgcgtattcgtattcgatacgtcccggcagttcgatgtatgagtccttttcgtccggtgaggttttttctttgcggacgtatttacttcccgtctgtgactggcggggaacgcagtatccgtctttcacgtcgagtgccactttcgaggagaaagcaggaccgtagaagagaggacgggttccgtattgttcacggccgaggtattcgcccagcgtgaagatatcttccggagagttctggtccatcggtgtgttggcggtagaacggattacgatcagtgcataagaggaataaccgatcacgatcatcatggtgcacagcaatgccgtattcatggtacgggcggagatgcgccatttctctttgatcttttcctgtacttgcggagcaaggtagatgccaagaattgcgatcactacgacaccgatgaggatgctgcttacgccgtgtccatagaatggaatacccagcagggcgatggtcagaatgaatgagatggccatgcggagtctgctcttttcggtgtagctttcgtacacaccccagataagggcagcagcaagcagaatgatatagactacgacgccggagttgaacgacatgccgagtccattgacaaacagcagttcgaaccagccgccaactttaacgataccgggcacgatgccataaagcacggctgctacgagtacgcccgatccgagcagggcgagcaatgagcctttggcagtggcgttcggagttttcttgtagtagtacaccaatacgattgccggcagacagaggaggttcagcaagtgaacaccgatactcagtccggtcagataagcgatcaggatcagccagcggtcgctgtggggctggttggctacatcttcccatttcagaatcagccagaatacaatggctgtaaagagggaggagaaagcatatacttcgccttctacggcagagaaccagaaggtgtcgctgaaggtgtagaccagtgcgccgaccagtccgctacccatgacagtgataagttgtcctttcgtgatgttgctctcgtcggtgattaccagtttgcgtaccagatgggtgatgctccagaaaaggaacaggatacaggcaccgctcatcagtgcgctcatgtagtttaccatcttcgctacggtggttacatcggaggcaaattgagagaacaggttcgctaccagcatgaagaaaggtgcgccgggcgggtgtcctacttccagtttataaccggtagttataaactcgggacagtcccaaaaacttgcggtcggttctattgtcaggcagtagaccgttgccgcaatgatgaatgtaagccaacccacgaggttgtttatagttctgtactgtttcattagcactatctagatttttcgttaaaaaacagattacgtgggcgcaaagatagtgatttgtaaggataatgaggcagaaagtaagaaatattaagtaacggaaaggtgatttactttatcttatgtccttttagggaaacagtggaatcactaaacagtataaacaacggtaggtatgaagataccaattttgtgtcttttataccaagcaatgaatcatttgttggtcaataatacttgcgttgtcagacattaatagctgacttttcaactgttaatacctgacatgtcaactattaacatctgacatctcaatcattaacagttgagaagtcagttgttgctgcttgatgtgaccgttgtaaatggctgatatgcagtgcggccgttctttgatgtagcaccggcaaatgaatgtttagtgatgatgatgatgttcaccgagaacgcggtgtggcaacgtgccgtgtcccagcagttcgatagggcagttgaagtttctttccagccattctgtggagacgcccgtgtcagggtggtaatccagtgtctcgttgacgcaggcaatggatttcacttgttgcagtacagtgccgatgtcgtgactgacaaggatgatggcgcattctttgttaatctccgacagcagttcgtagagccgggcttcgaagcgtttgtcgatatacgtgctgggttcgtcaagaatcagtaccgaagggtcggagatgatggcgcgtcccagcagtgcacgttgtagttgcccgccgctaagctgcccgatggaacggtgttcgagtccttcgagtcccatacgggcgatgatatgcttgcctttttctctttgctcgggagtgaagcgggaggtaagggatttctggatacttagtccggagagtatcacttcctctaccgaaatcgggaatttccggtcgatggtgctatattgcggcagatagccgagggaaagtgaagaattggaagtggaaagttgagagtgggaggatacttctgtaggggcatggaagttgatttctccggctgtcggtttcagcagaccgaggatgcacttgatgagtgttgtcttaccgcctccgttcggaccgatgatgcccagaaagtcccgttcgtaaacgttcaggttgacgtcgtggagtacggtacggccgtcgtatccggcagcaaggttctttatttcgataatcggtttcatatttggagaattacttcgtttatgtatcattcggtcattaacgctatggaggcccgttgttattcggggtccataggggtgagagctttggctacgttcagcatttccgtttcccagtcgtagcttaacgggttgatggggactacctttgtgccggtttgctgtgcgatggtttccgcgttgcgcttgtcgaactccggttggacgaagatgacgcttactttctccgatttgcacaggtctatcagttctttcagatgggcgggcgaaggttctttgccgccttcttcgattgaaatctgatgcaggccgtagtcacgggcaaagtaggagagagccggatggtaaatcataaaggctttggccgattccggagcggaaagttgccggcggatgaggctgtcggtgtgctggatacgttggcagagggagtcgtaacgtgccaggtaatatgcttcgttaggcttgtcgagcatacaaagtgccttgaaggtgtttccggcaaggatgagggcgttggtggtagagttccagatatgcggttctacggcgtgattgtgcccgtcgtggtcatgatgtcctgctgcgtggttgtgctcaccgttgttcagaatcaggtctatacctttcgaggtgtcgaatacttggatatgaggggtgttattcatcagtcggtccatccaggtctgctcaaagccgatgtagccgatacggagataggctttgctgtctcccagagagacaagttgctgaggaatagggtcgtatgtctccggactggaacctttcgggaccatgctgactaccgtgaatttatcaccggcaatcgcttccgtgaagtagcgctgcggttcgatagtgacggtaatgaccggtttcgcttcttcgctgccgcttgctttggatgcgcgacctgtgcaggctgccaacaggaggcaggagccgagaagaaggagtgttttcaaatcttttagttgttgtttcatgactattgtattaatatcgggggttgattctgttccagttttcgggcacgtagtatttcccgctttcctcccggaggaccgggaaggcgctctacgataaagcctgcggcctgcagcatacgtcggatgactcctttggcacaataagtggtgaggatgcctccttcatttaataaaacatataaacggttaaatagttcctgcgaccacatttccggctgcttttccggagcgaaagcgtcgaaatagataatgtcgaatgataatggagaatggctacgctgtgtaatggtgcggtttattgtctgttgtccattttctactcgttcattaacccatttattgacgtcggcttgtactttgcaaagagtgaagttgggggtaaaggatatttcttcttcccacggtgatgtatgaatcgctctgaacaggtcggtagctgctggttgttctatatatcccagttgctccaccatctgccattccaacgggtagagttcaagtcctgtataatgtacgttacgtccgcttctttctgcttcttcaagtgtaagccaagcattcagccccgttccgaaaccgatctccagaatatgcggagagggggcagcggaggctttcagtcccatgttgatgaaaatatgctgggactccgtacgtgctcctttggtcgaatgataatgttcattcaattccggaacaaatagggtggcgctcccgtcatcagtcttttcaatcactcttttcatctcaaaaaacttattacctgttacctgttacttattacctattatttcatcccgcaacgacgttccatgcgctttccagtacgtacagaagcagaatgtaacgtatcagtttgccgacaaacatggaggcggtggtaagccatatattacttcgcataaatcccagtgcgatggagatcacctctccgatggccggcaggaaagcgaagaatgccatcaatgctccttttccttgcaggaatcttaccatcttgtctactttctccttctttactttgaagtatttctcaatccagcttattttgcccaggcgccccatatagtagcaggtcattccgcctgccgtattgccgagggtggcagccagtatacaggcagtgggtggcagtccgagttttaccagtgctaccaacaccagttcggaactgaatggtacaatactccctgcgagtaaggccgagataaacaatcccggaagtccccattcgatgaggagttgtatcgttgagtctataaaagcgtccatacgttaaaaacaaataaaaggatgaggcagaccgtagcaacaatgaagaatatattcgatgttttattgttggtcagcacaaaaaggtggccgatcagtatgctgttgcttatcatgagcaatggcaagagattgctgcattgtgacggctgtagcacaatcagtacgaagagaaagagtgtcacgtctatgagaaactgtaaataggcgcgcgtacgtatcttatcttcgaatccggcaacgacgcaatgggcggcgctgacgatgaacaatacaaacagatagccgagagtcgccagctcccacggctggagtatctgtaggttgaatatatctccaaaagtagccagttctttgaaaggatgatagaacagctctatctgatcgtagaagaaagcgtgtccgaacagcatccagtagggcattgtccatcctaccagcgcgccacagaaactacggaacgtaagtgactgaaaacggtgcgcctcaaacaaccagagcaccgagaagaaggtgagctggggaaagagaatgctccctgcaccgataaacaggaacgagtagaacagatatcctgacgcctgtgcctgctggtaactcttgaacaggaaatagatggagaataaaaaggttatggcggcaacgtttccggcatatagcaggtgcatctccggacagacggtgaccagcagaaaatagatagctgtctgcacggaagcccgcatacggataatactgaaccggttgttcagctcgatcaggaaatagccgatagccgcgtaaatcaagaaactgacaagatgctccgcccatgcggggagcagcaacgtgcgggcagactgccaaagcacggaaccgccttcttcgcccgctgtcatggtgagttcgggcaataggacagaggtcagcacccaacaaagggtgcagatgaaaatcgcagcagggagtgtccaccgccctgctgtgaccagaccttgtagtctcttgtttctcattataagtcgaatccgatatcgcgacggaaatatttcttgtcgaagtcgatcatatctgccactttatagctctgtgccagcgcttcttccttcgttgcgccataagagcagacagcgatcacacgtcccccgttcgttacgatttgtccgtccttcatggctgttccggcatggaaaatgatgctttcggtagcggcggcctgttccaggccgctgatagggaagcctttttcgtatgcttcaggataaccgccgctcacaaggatcacacaacctgccgagcgcgggtccatgaccagtgtcttttcatcgagattgcctgcggctgtgccttccagcaattccacgaggtcgctttggatgcggagcatcacgctttccgtttccgggtcgcccatgcggacgttatattcaatcaccatcggttcgccttttacccggatcagtccgaggaagatgaagcctttgtagacgatgttttcttctttcagtccgttgatggtaggttcgatgatgcgggtacgtactttttccatgtattcttcatcggcaaacggaaccggagtcacgctgcccataccgcctgtgttgagtcctttgtcgccttcaccgatacgcttgtagtctttcgctacggggaggactttgtagtgttcgccgtcggtaagcacgaatacggaacattcgataccgctcaggaactcttcaataacgactgttgccgatgcggagccgaacataccgccaagcatttccttgagttctttctttgcctcgtccagtgtggggaggatcagaacgccttttccggcacagagtccgtcggctttcagcacgtatggggcttccagcgtttcgaggaaagccagaccttcttcgagattttctgctgtgatacttttataccgggctgtcgggatttgatgacgcatcatgaagcctttggcaaactccttgctgccctccagctgtgctccgttggcggacggaccgataacggcgatatgtttcagttcgggacgattctggaagtaatcgtagatgccttctaccaacgggtcttcgggacctactactaccatttcgatgttttctttcagagcgaaagcgctgatcgcttcaaagtcggtagctttgatgttgacattctcgcctacggcgtttgttccggcgtttcccggagcgatgtacagcttttcaactttcggactttgggcaattttccatgccagtgcatgttcgcggccgcccgagcctagtaataatatcttcataatgagtattaagttatgagttttcagttatgagtttttcggtatgatgctgtgagctgtcaactatagattgctataggttctgctcaaagtatcgggtgattttttcgtgcagatgtacacggtcgcggcctgatacgttgtgcttgtggcacggatagataaacaggtcggggtaggtgcgggcatctacacaggctttcatgaacgacagtgtgtgctgcggtacgcaagtgtcatcgtggtcgtcatggataatgagcagatgacctttcagctgtccggcaaggttcttcagattacattctttgtagccttccggattgctttccggagtgtccatgtaacgttcgccgtacatcacttcgtaatatccccagtcgatgacaggtccgcctgctacgcctaccttgaatatttcggggtagcggagcagcagggcagtggtcatgtggcctccgaagctccatccgtgtacaccgatgcggtttccgtctatgtaggggagggatttcagaaattcaatgcctttcacctggtctttgccttcttcgatgccgaggcggcggaaggtggcgttttcgaattccagtccacggttggcactgccgcggttgtcgagggtgaacatgatatagcctttgttagccatatagatatcccatccgcgggagccgttcagccaaccaccggtgacgagttgtgcgtgcgggccgccgtatacgtagacgatgaccggatactttttgttcgggtcgaaatctgcgggtttggtgaggcggtagtataggtcggtcgttccgtcgtcggctttgatagtaccggtttcgatggtcggcatctcgtagccttcgtatgggtctttggctgtcagcaggttgactgttttcaggcttttggtatccacgatgtcaatgcggcgcggaagggtgggagtcgaataacggtcgatgaggtagcttcccgatgcgctgagcattccgttatgttctccttctgtgatagaacggaagctgaacgggaggctgcgctttcctgtgttgacatttactgcaaagttattggagcctgtgccattcactccttggaagatgacttctttcctcttggcgttgaagcccagaatgtcgcctaccagccatttgccctcggtcagttgcttcgtcgggatgtattcgatgtgtttgccgcctgcggcatcgcttttccattcgcctttgaggctggaggtgaggtcgcataaatatagatggttatatccgtcacgctggctctggtagatgaatttgctgttgtcccacggtaagaatacgatggggtgctgaggctctacatacttggggtgtgtttcttccagcagtttgcccagtaacttgcctgtcgttgcgtcatattggcaaagtacggcgtggttctggtcgcggttcagttcgatcagataaatgctcttttcgtccggtgaccagctgatattggtgaagtaacggtcggtcggatcacctgcattcagatagatggtcttgccggtggaggggttgtagacgcctacttttacttggtggctggtcattcctgccatcgggtaacggacgttattcacttctcctacacgtgcggtgatgtctacaagcgggtattgcgtcaccatgctttcgtccatgcggtagaaagcgagcaggttgcctttcgggctccagaaggtacctttattgatgccgaactcattgcggtggacagactgcccgcagacaatgccttcgggttcgtcggtgattgcctgttcgttcacatacaggttgttgttgactgtgtaggctacgtttccgttggcgacgcaataatcttcgttggctgctttatctttcagcttcagcgtgctgacaatccggttgttctcgaaatcgtatacgatgtacttaccggatactttcagtaacatttgcggtttgtccgcccacgggtagcggattgagtacggggtcggcagtttccctgctttattgtctgccagtactttgttgatttgtccgagggtagtcagcactgtctctttccctgttttgggttgaactgtgtagatggtgtcggtactcggtttgatacacacgtctccccaccattgcaggccgtacaggttttctgcataacggtaggtctcgccgcccggaatcaagtcttccagtgtcagctttttgatttcctgtgccataacattgaatccgattggtagcgccagcaatatcagaatggctctttttccaattttactcattgcttttatttatctttattggttttaaatccttctattttaccctgttcaggagagttgtctttctctgtcggatgatacgtctttttcgagatattcaattcgctttcttactcatcaaatgataagatcgcaaaatgcgaccttatattgtctatcaataagttaatggcattttttagtgagatgccattaactatctatgaaattactcttcttccttcttcggtatcctaggctcacggtttcctctgaattctctcggagctctcgaatctctttcccctcggaactcgcctctaggctttttgtccctgtcatcccgggtaaagcttccttcttcccgtctcggcttgaagtctccttctttacgaggtttgaactccccttctcgacgtggcttgtactcgccttctctgcgtggtttgaattcctttctttctctgggtctgggagtatcatagcctccttcagtctctttcttctcttctccttctccctcctgactcttgaactccttatatttcccgtcgaaaatctcgtatttgcggaactcgcattccaatgcgccattgaacaacggcactttcttgcttggtttcagcccgatctgatcgaagcattcttctctataagagagtacccaagcctcgtttcctacaaatgcgtgcttcagacgctcgccaatcatctggtacagtccgagcaggtcattggtagagatacgttcgccataaggaggattcatcacgatgatggacttctcctgcggctgttcgaattgctggaacggttgcagtttcagcgtcacatctttggatacacccgccgcttttatattatgcgtcgctatttcattcgctttcggactgttgtcatatccgtaaatcttatgggtgaattcgcgctcctgactatcatcattgtaaatctcatcgaacatctccgaatcgaaatccacccatttctcgaatgcgaatcctttgcggaatactcccggagcgatgtttcttgcgatcagtgcagcttctataggaatcgtgcccgaaccgcacatcgggtcaatcaggtcacattcaccgcgccatcctgtcattagaaccataccggcagccagtacttcgttcaacggagcttctacctgttcctggcggtatccgcgacgatgaagcgactctccggaagagtccagagacaacgtacaagtggtatgtgcaatatggatattgagtagtacatccggattattgatgcgtaccgacgggcgtttgcctgtcttttcacggaaatagtccacgatggcgtccttcactttgtacgagacgaactttgaatggcgaaattcttcgctgaatacaactgcgtctatcgcaaacgtcttgttcacatcaagatactcttcccatggaatggcctgtatctggttgtaaacttcatcagcatcctttgccgtaaaattcttgatcggtttcagaatgcggatagcagtacggaggcagaaatttgccttgtacatcatacgcttgtctcctgtaaatgaaaccatgcgacgtcctatctggatatcgttggctcctagtgttgtaagttcttcagcaagtatctcttccagtccttggaaggtcttggctatcatctcgaattgttcgctcatatatagtttattgattttatttctttgcttttgtctgtacaatctttgctccggcgggaatgttttccgttacccagatatttcctcctacggttgcgtcgcttccgatagtaattcttccaaggatggtggcgtttgaatagactatgacattgtcttccagtatcgggtggcgggggatacccttgatcggttttccgtcggcatccagcgggaagctttttgctcccagggtgacaccctgatataatttgacattgttcccgataatgcttgtagcgccgatcacgacacccgttccgtggtctatggtaaagtgactgcctatcttcgctcccggatggatatcgatacccgtctcgctatgagccatttccgtgatcatgcgaggaatcaggggaacacccagttccagcagttcgtgcgcaatacgatagttgctgattgccttaatggcgggatagcagaaaataacttcaccgtagctcttggcggcggggtcaccgttgtaggcagcttctacgtccgtagccagtattcttctcatggcgggtagtttactgataaagttcgcagccagtcgggcggcttcttctcttctcgactccgagcagacattgcagtctccttcagccgtactgaaacatagtccggccaggatttgctctgtgagcaagtcaaataacttttcgatatttacaccgatgtgataattgattgtccggctgttgatggtggaatttccgtagtatccggggaagagaatggcacgtgaaagctcgataatttcatacaaaactttagcagagggcaatggttcgccatctttatgttgatgaaacagccctttgtaagattcgctttccgatagctcatcgactgcctgtgtcagaatgtgggtaaagttcaatggactcattaggtcagttactcatgtttatatggggacaaaggtattaaaaaaataataaatttcgttgagattcaatataattaatgtatttttgtggcattcaaaattcaacacggacaaggggatgaataaagcgaaatctactatgaagctatttgggttgatagggttgttgatattgtggaactgcagttgcgtggataggcaccgcagtcacgctttgtgtgaacagtcacttatcgattctttagaagtccgtgcacaagattccctgttttccaacttaccttattcacgttctttattgcgtaacgcaatgcgtcaggcacaggactcgatgagttattaccgcttgatgggattgtatggaaagactttcttcatctcgtccgatttcgactctatcctctattataaccgccctgtaaaagagtatgataagcgtgcagctgcctgcccgcgatggaatgatgtgctttcggatgtgtataacattgagggaaatgtctggatgcaactcaatcagcccgattcggcggttgcctattatgagaaatcctatgcttaccgtctgaaaggagataaggcgcatcttctgtcggatatctgtatgaatctggcggatgcccatctgcatcgtggcgaactggcacataccgcttcctattaccggagagcattgtttatctgcgactccctgcatctgtcggaacattccaaatttccggtctattgcggactgggacagacttacatggacttgcgtgattttgatttgtccaatcattattacgaattggcaggacagttctttgatgaaatgacagtcagcgaaaagtgggtgtatcttaataatcggggaaatcattactattataagaaagattatcaggaagccctggtctatatgcggcaagcagcggagctgatagcggattacccgcaaatggtattcgaaagcaatctttcgaaagttaatctgggcgatctttatctgctgacgaaccggctggattctgccgaaaacaatctgaatgaaggttaccgttacttttcggagataaagaacaactccgccatgcactacattgaaaccctgatgattgagctttctctgaaaaaaggaaatatcgctcgtgccagggaaatgatagcacggactgcttctaccggacacgtggatgccaatatgcttactatacgcaaccagtatctgcaacattattatgaaaaggcaggtgactaccgtaatgcatatgagtatctgaaacgtgattatcaactgaatgactccatccgtagcgaacggattcgtacccgtgtagccgaactggatatgcgttaccgtcaggacacgatcgtattgcgcaaggaaatgcagattcaacggcaggcgggtgaagtgcgtgtcttgaaactgagtatgtatatttgggtacttgtctgcctgttgctggtagccggaacggtggtaatcatctggtatatgcggaaaaaacgggagtttcttcgtgaacgtttcttccagcagataaatcgcgtccgtatggagaatttgcggggccggatttctccccatttcactttcaatgtgctggggcgtgaaattaatcagttcaatggatcggaagaggtgaagaataatctgatggaactggtcaaatatctccgccggagtcttgaactgacagaaaaactaagtgtttctttgcaggacgagctggattttgtacagtcatatatccgcctggaaagtggacgtgtcagcgaagacttcacagtttcggtcgtagtggaggaggggttggatgcaaaaagtataatgattccttccatgattgtacagattccggtagagaatgcgattaagcacgggctggccggaaaagatgatgagaaggaattgactatccgtatttcccgtgaaggaaaaggagtccgtatcgtgatttgtgataacgggcgggggtatcttccgcaagtggcttcttcgaccagaggaacgggaacggggctgaaagtgctctatcaaacgatacagctactcaatacaaagaataaaaatgagaagatacgtttcaatatagataaccgaaacgatgggcagaccggtacgcaagtgtcggtgtttataccgtttcatttttcttatgatttatgatgaatgcagaagataaatataaagtcgttattgtagatgatgagcgtacggcaatcgatgctttgcgcagagaactgggcgcttatcaggaacttgaaataaaaggaactgcaaataatggcgcaaaaggcaagaagatgataatggaactccgtccggatctgttgtttctggatgtggaacttccggatgtgctggggcttaacttgttgagtgagatgcgcgatgaggtgctgtgggatatgaaagttgtcttttatacttcgtatgataagtatttgcttcaggccctgcgtgagtccgccttcgatttcttactgaaaccttttgagacggaagatctgaaagttgttatagagcgctaccggaaggctgtagcttcgataccggcaactccttcttcctctttttcttcttctgtcagcgctttgatgccgcaacagggaatgtttatgatcagtacggtgacaggtttcaagcttttgagactggaagagatcggttatttcgaatatctgaaagacaagcggcagtggcaggtagtcctgttcaatcagacccgattgaatctgaagcgaaatacaaaagccgaagatatcattggttattcacaagcttttattcagatcagtcagtcggctattgttaatgttaattatctggcgatgattgatgggaagtgttgtcagctctatccgccttttcatgataagagtgatctggtgatttcccgaagttttctgaaagggttgcaggaccggttttttgtgttgtgacaattactccttaagatagatgcgaaaacgccgtttcttcatcaggaacggcgttttctatttgttagaatattagaatgagagagtatgttgttaaaaaaatgctgttacaaattagtattgttcatggtcactgtcatttctggaactaacacgtaagcgcgtttcttattgttccatttatagtaattggttgttacagtttttccttcgtatgtataattgatgcggagatctttttcccattcctctttggtactgttccattttagggtctcgctttcaatcatgcgcttgttgtcatcgtacttgtagttatacttcatatagttggcaagtgtacttccgttcattttgtaaacggtctgacctaccattactccattttcttctactggattataaaccaactgaccatcataactgcgtgcagaagcaacaaaagaggtcatgagaagaactacggatagaacaaacatttttaaagatacttttgttttcatggctatttgattttagcattattctttcatttgtctagtaatactcttgtattacgctgcaaagttatatatttattcggtatttatgcaaatataaagctaaaataataccaaaatgtcagatgatggctaaggtgataccttgctttttgccaagattggtgacaaaaaaatatccggcagtcaacctgccggatatagaatgaaacacttcgttggggaagtgatctttttcctagctttctggatagtgggttaaataatgttataactcatcctctccattatttagctgatttatcctgttttgttatggcaggataaaccttgttttagtgtgcttcgagccagttcttgccccagccgcaatctgctttcaagggaacgtgcatacggtaagcgtgttccatttcctcaataacgatctcttctacacgttctttttcgttgacgggcacgctgaagttcaattcatcgtgtacttgcaatatcattttagcttgtatgccttctgtctggaatcgctgataaatgcgtgccattgctacctttatgatatctgcggcgcttccctggatcggtgcgttgatggcgtttcgctcggcatagccgcgtacaacggcgtttcgtgagttaatgtccggcaagaagcgtttccggtggaaaatcgtttctacataccctttctcctgagctatctggatactcttctccatataggctttcacgcttggataagtttcgaaatagccgtcgatcagttctttggcttcctttcggtctacgttcattcgctctgcaaggccaaatacggagatgccgtagatgataccgaagttggcggttttcgctttgcgtcgcatatcggagtctacgtctttcaggtcgatcttatatattttggcagctgtagctgcgtggatatcatgattgctgaggaaggcgtcgatcatattcttgtcttcgctgagatgtgccatgatacgaagttctatctgcgaatagtcggcagagaagaacaggcagccttcgtcagggataaatgccttgcggatttccttaccgttctcgtcgcggataggaatattctgcagattcgggttactggagctgaggcgtccggtagaggtgacggtctggttgaaagacgtgtgtacccgtcccgtgcgcgggttgatcagttggggaagtgcatcgatataagttcccagcagtttcttcagtccgcggtgttccagaatcttttctactacgggatgtttatgccgaaggctttcgagcacttcttccgaagtgacgtactgaccggttttggtcttcttcgctttttcgatgattcttagtttgtcaaacagtacctcgcctacttgtttgggcgaagcgatattgaaggtttcgcttgccagttcataaatttcctgctcgatgcgttgcatctgagcggtgaaatgaacagacgattgtttgagcgcttccgtatccagcaataccccattccgttctatattgaccaatacgggtacaagcggcatttcgatatcataaaacaaacgttcggcatcgttctctttcagttctttctccaggacgtttttgagcttcagtgttacgtctgcatcttcgcaggcatagcggtagatatccttcgggtcgagatcgcgcatgtttttctggttcttccctttcggacctatcagttcgtcgatgtggatggtctgatagtgaagatagatttctgccagatagtccattccatgacgaagttccggttgaagaacgtaatgggcgatcatcgtatcaaagagcgcacctttcacttgcactccgtaattttcaagaacgatcatgtcgtacttgatattttgtccgactttcaatgagttctcattttcgaagaccggacggaactcgttgacgatttttaatgcttcctcacgattgtcggggaccggcacataaaaagcctgattttcggtgatagagaaactcattccgaccagttcggcgtccattggttccgttcctgtagtctccgtgtctaacgagagaattttcgatgtaagtaacttttgaatgatttcagctcttttcttctctgtatcaatgagttggtagtcgcaattaagcgtttctaacgtctctagattcgattttttggcttcgcctgcctcattgcccgtaaaattcgcaaataaatcgccttgtatggctcctccttcttcgggaaaaagtggaagaggagagggagcacttttggccgttgccgttttgcttccggttgccattgttactccgccggcagaattttcttttttcagtacccggtcgatcagtgtccggaattccagttcttcaaaaatttgtcggagtgaatcttcgtctgcctgttcgcggacgagcttgtccatttcgagttggataggaacatcgattttgatagtagcaaggaatttggagaaagtaatcaattccttattggtttccactttcgttttcaaggctcctttcagttggtcggtatgttccagcagattttcgatacttccgaattcggcgattagtttctgggcagtcttttcaccgacaccgggacaaccagggatattgtcggaggcatcgcccatcagtccgagcatatcgattacttgtgcgggcgactggatatcgaacttcgctttcacttcttcgatgcccatcacttcaaaacctcccgtatgtttggggcgatacatgaatacgttgtccgtcaccagctggccgtagtctttgtcgggagtcatcatataggtggtgatgccctgacgtccggcttcagtggcgagagttccgatcacgtcgtcggcttcgtatcctgccacttccagaatcgggatgcggtaggcgtggatgatatcctttataataggtacggagaggcggatagcttccggagtttcttcacgctgggctttgtattgctcgaaagcttcgtggcggaaggtagggccggaggggtcgaaggctactcctatatgtgacggattctcctttttcagcacctcttcgagggtattgacaaatccgaggatagctgaagtattgaaccctttggagttgattctgggattcttgataaaggcgtaataagcccgatatatcagtgcataagcgtctaaaagaaataatttattgtctgactccatagatttaattaatttttcatggtaaaagtacaaaaaaataccgtattaagcgttttattattacttttgtgctcaaatagtgttgtgaatggatagtatctctcttatcaaaaccccgatagaagcggaactggaggattttaaagctctttttgacacccctctttccgattcgaatgcattgctcgacagcgtaataactcatatacgcaagaggaatggcaagatgatgcgtcctattcttgtcttattggtagcacgcctttatggggctgtgactcctgccacccttcatgcggcagtttctttggaattgcttcatacagccagtttggtgcacgacgatgtagtcgatgaaagtaccgagcgtcgcggtcagctttcggtaaatgctgtatttaataataaggtatctgtactggcgggtgattatctgctggctacaagccttgtgcacgcggagcagactaataattatgagattatccgtctggtatcttcgctggggcagaaactagctgaaggagagttgcttcaactttcgaatgtaagtaatcatagcttttcggaggaagtttattttgacgtaatacgtaagaaaacagcggctctttttgccgcttgtgccgaggcggctgccttgtcagtgcaggtgggtgaggaggaagtcgcttttgcccgtctgttgggcgaatatattggtatctgttttcagattaaggatgatattttcgattactttgatagcaagaagatcggcaaaccgactggtaatgatatgctggaaggtaagctgacgctgcctgccctgtatgcattgaatacaacgaaagatgcgtgggcggaacagatagcgttcaaggtgaaggaaggtacggcaactcctgatgaaatcgtacgtctgattgagtttaccaaagataatggaggtattgaatatgcctgtcgtacaatagaacaatataaaaagaaggcctttgatttgctggctgccttgccggattcaaatatttgccttgccctgcggacttatctggattacgtggtcgcccgtgagaaataactactccccactgttcctgagcagagagtaacacaggattaattcctcccaatcttcaattttattcgatttcatcgctcctccgatgaggaaacttttgtctatttcttccggtgtgcggaggatttcggaacataacgtgctcgcctgttcgatgtattcccatgcttgttctttggtgatgtagccgcagtctttggcagcccgggccagcccgacaacttgtgccatatcccatccgatcactcctctctctaagtcgttaatccatacaatcggctctcctctttcttctatatactctttgaatttgtatagatttctgccctgttgaatgaatcggtctactccgtagaagcgttcgcggatggtgttttcaaactggtttaggttttcggtagagagtaaataggggaccataatagaataggaggctctgtcgccttcgttgatgaggaataggaatagctggcaggaagaaattgcatctgtgcaatggaacttatctgataatagtttacttagtttttccgggtgtactccggtttccatacagttaagatagaagccatccagtgcagcctccatataaccgatgcgcagaccttgtttctttctggtgccgagtatcagatttaaggggttatggttaaaacgtaagttctttgtgtgtgacttcattttatactttttcgcttatggttaactaaaaaaagcgtgagaactgctgctatatgtcttttcctggggcttcggcaagccgttatgatgacataaaagcaacagtctcacgctccgttcgatatataacaaaagtatatacatgaaggtgcgtgagacccgtttgcttattaccactcataactttgaattttgccgaattccaggaatcaggtaataaaagaaacgttctctaatacagatgattaactatgttagcatagctacatctatgacaaagataatgaaaataatggttttgtccataagtatctttagtttttattatataaaaaataccgcgcttccttccataggaacggaaggtgaagcgcggtacggcatacttgattgctaatgtaattccttagaagaatttgatctcttcgcccttgatatcggagagaagcaaattggccaaacgactggtacccagacggaacaatcggttgttcagccattcttcgcctaatatttctttcacaatagtgtaataaatgattgcatcatggacggtgttgatgcctcctgccggtttgaagccgatcttgttgtttgttttttgatagtactccttgatagcttcgcacatcacataagcggcttccggggtagcggcaggctgttgctttccggtcgatgtcttgatgaaatctgcacccgaatacatggataggatagaggctttcttgatgttggaggcggttttcaaagcacctgtctcgaggattaccttgaggtggcgttccttgcagacttcttttaattcctgaatttcttcgcacattgtttcgtagtcaccgctcaggaatttaccgatagagataacaatatctatttcgtccgcaccgtcagcgatagccagtgccgtttccgctactttcacttcgatgaaagtctgagaagaagggaacccgcccgaaacacaagcgatattgatgccatctacttgcagtgtattctttacaatatccgcgaaattggggtatacgcagatggcagcgacgttcttcatatcggggaattcattgtcgaactcattcactttttcggtgaaatgcatcacgctttcatcgctgtccgtgctgttcagcgtggtcaggtcgatgcagttgaacaggagtttcttgacttcttccgtattgttttccggcactttcttttcaatcaggtcagccacccgagcctgtatgtctgcatcgctcagattggtgttatactttgccaatgcggcatcatacttgttggattgtgagctattctcttccatgatcgttcagttttgggttattgatatgtcttttattatctcgtttcgttttcttttccaggctttccctgaaggctttggtgatgtctacgcctgtctggttggcgatacacaggagcacccataagatgtctgctatttcttcgtcaaggttgtctttctcgccttctttgaaagactggtcgccgtatttgcgggccatgacacgggctaattctccgacttcttcagtcagtacggccatatttgtcaattcgctgaagtagcggacaccgtatgtctttatccatttgtctacttctttttgagcttcttccagggtcataattgctgttggtttatgatgattagtttgatgtttagagcctgtttatcactcttcgaagagctttaccggctttttcatcaaggttttactctttatttttggtgtccatacatatagtaacaggaccgtcatttaaaagttcaactttcatgtccgctccgaaagttcctgtgccgatttcttttcccagcgccctgctcaggtctttgcagaaccgttcgtagagtgggacagatatctccggcttggcggctttgatgtatgacggacggttgcccttcttggtagaagcgtgcaacgtgaactgactgatgaccagaatttcacctccatcttccaggatcgacttgttcattactccgctttcatcgtcaaaaatacgcagatttactatctttttgcagagccagtctatatcttcctgtccgtcggattcttcaatgccgactaatatcagcatcccttttccaatggaagacttgcactgtccttcgatggttactgatgcgtggcttactcgttgtacaactattctcattgatattttctctattctattgaatgttacgaaaggcaaatttacgaaattaagaagaaaaaacgatggattggaaggaaatattataggagataagtattaggtattaagtattaaccgtagctgtcattcggaagcgtgtctgtctgttgtgcagaagcatatctattaggacgacagatgtatttgcctcataacttgattgagtttgccttagaaccgtatagacatgaacataaactctataacattaccggtagtactctatgtggttagaaatcaatggtatatagtttcctatgatttcttttaatggaaactgtcgtttcccggcgagggaacggccgttccttttaatggaaacgaccgttccttttaaagggaactggcgtttcctccgaggaaactaacgcttgccccatatgatactgatacttgatttatatggactaacaatttagcgtatagccacatagaagtgagcctattcgttgcttaaccctttttttacagtctgagccttcacttctcctatgacctttgcgatttcttcaagggatgcctctttgattcgttttacgcttttaaactccttcaatagggctgtttttgtcttttctccaatccctttaatgctatccagagccgatgcgacctgtcgcttgctgcgcttgtcgcggtggaaagtaatcgcaaaacggtgtacttcatcctgaatctgcgtcagcagacggaataaagaactttgttgtttgatcccaatcgtctgtgcgggaaacccgaaaagtagctctgacgtgcgatgcttattatccttagccaaaccggcaatcggaatattcagatgcagttcatcctcgattacttctctgacgacttccatttgtcctttaccaccatcggtaataatcaggtcgggaaggggagaattttcttcaatggcgcgctgataacgtcgtctgaccacctctttcatggaagcgtaatcatccggtcccacgaccgtcttaatattgtatttacggtaatctttcttcgatggtttcgcctttttgaatactacgcaggcagctacggcatccgatccttgtatattcgagttatcgaaacattcaatctgcaaaggtggcttgtctaaatgcagttcgttttgtatttctttcagcagacgcatactgcgctgctccgggttcagtttctcggcttgtttcaatcggtcggccttatattgcttcacatttaggatagaaagatcgagcagttttttcttatctcccctttgaggaacggtgaaaacgacattattcaactccagatcaagttcgaaaggaacaataatctcccgtgaatggctcttgtagcgctcccgcatttcaataatgcctagcgtcagtaactcttctttcgattcatttagcttcttcttgtactcaaaggtgaatgcctgattgatggcgccattggtgatgtgcagatagttgacgaaagccgaatttgaatcgtcttcttcgatggaaaagacgtcgatattgtgcaggacagaacttactacctccgatttagaccggtaattctctatcagcagatacttctccttaatcttctgagcctcttcaaacttcatttcattggccagttcctgcatcttttctaccagcatacggctaatatcctgcgtatttcctttcaaaatctctttgatttcatcgatgttcttcagataatcctcgtgcgattgcagtccaacgcatggtccggcgcacttcttgatgtgatactccaggcaaaccttgaactttcccgcccgtatgttctccggagaaaggttcagattgcaggtacgcagcggatatagatgcttgatcagatcgagcaccgcatacatcgaaggaaggtggctgtagggaccataataagaagaaccgtttttgataatctttcgagtcctgaaaatgcgtggaaagtattcattctgtacgcagatggaagggtaggtcttgtcgtccttcagcaatacattgtagcggggcttatatttcttgatcagattgttttccagcaataatgcatcttcttcggtgttaacaacgatgtaacggatgtcggcaatcttgctgaccaatactcgtgtcttgccgggttcatgctctttgctgaagtaagaatatacccttttttttaggtttttagcctttccaacgtatataatagtcccttctgtgtttagatactgatagactcccggcttctcgggcaggttggctacaatacctctcagatattcattcgttttggcttccggttctgtattcataatcgttatagatgaaatagcgggaaataaaaaagggcgtagattctctacgccctgcaaatataagcaatttgtttataaagtcaatacggattctacttctacgtcatctccgaatacggatttgccattcaggtctttcaattcgataatgaagtttacatatacctttttaggcttcagtttcttcactagttcgcaggctgctttcatagttcctcccgttgccagtaggtcgtcgtgtagtaaaacgacgtcgttttcatcgagtgcgtccttatgaatctgcacagtgtccgtgccatattctttgtcgtagctttcttcgatcacctctgcgggaagtttgcccggcttacggataggaataaaacctgcgttcagtcgggtagccaggataggccccatgatgaatcctctggattctatacctactactttggtgatacctttatccttgtacatttcgaacatgatgttcgataattcttgcaagcaccaagggtctttaaacagggtggtgacatcgtagaaaaggattccggggatcggaaaatcgggaatttcccggatgcttttaattagcgtttctttgctcataatcattggtttatctcgtttctttaaatgatttgtttcacgtgaaacgttgccgcttatcggccggaaagtaccagcaatacgttgatgtcgcttggtgatactcccgggatccggctcgcttgagcaatcgtttccggatcaatcttcactagcttctgacgagcttccgtagatagcgactggatggaagcataatcaaatttgcctttgatcttgatgctttccaggcgtgccagcttttctgctatcattcgctctctgtcaatatagccttgatacttgatcagtatttctgccgcttccagaatctcttctttacggtcggagtctgcagtggttgctttttctaattctctttggaaggcggggacatgttccgcgatattctcaatcgtgatttgcggacgattgagaatttcgatcagcttacagccttgacgaaggggagttgttcccaacttttcgagggcatcattaattaatgccggtttcatcgaatagttctttgcgaaatttactatctgctctaatgcctccttcttggtcttcattaattggtagcgatcctcccttgccagtccgaggtgatatgctctttcggtcagtctcatgtcggcgtcgtccatgcggagaagaatacggtattcggcacgtgaagtaaacatacggtatggttcgtctactcctttggtcaccaggtcgtctatcaatacaccgatatatgcttcgtcgcgagccagtgtgaaggcttcaccaccgtgacagttgatgtgtgcgttgattccggcgatcagtccttgtcctcccgcttcttcgtaaccggttgttccgttcacttgcccggcaaagaacaggtttttgataatcttcgattccagcgaatgttttaattgggtggggtcgaagtaatcgtactcaatcgcatatccgggacgatagatgacgatatccttgaatgccggtacttttttcagcgcggcgatctgaatatccatcggaagagaagaagaaaatccgttcaggtataattcctgtgttgtttcaccttcgggttcgaggaacagttggtgctgctctttgtcggggaaggtgacaatcttggtttcgatgctggggcaatagcgcggaccgatactttgaatctgtccgttgaacaggggagaatccggcagcccttcgcgcagaatccggtgcacttcttcgttggtatagcaggtccagcattgcagttgcttcaaatggcgcgtactggtattcatgaatgagaacttgtggaagtcgcattctccgtcttgtgtatccatcaaatcgaagtggatgctgcgtgcgtcgattcgtaccggtgtgccggtcttcatccttccgtaggcaatgccatgtcgggcgatggattctgtcagctggtaagatgcgggttctgccattcttccgccgggcaattggtggcggcctacgtgcatgagtccgttcaagaatgttcctgcggtcagtacgatacatttcgctttgaatgtgacaccccaaagagtgacgagtccgactacttcactgttttcaacgagcaattcacagacggtatcctgccagatatgaaggttgggagtattttccagtttctcacgccatgaccagataaacttggcacggtcgcattgagcgcggggactccacatggcgggacctttcgagcggttcaggattcggaactggatagcagtttcatccgtcaccaatcccatctgtccgcccagtgcgtctatttcgcgtactatttgtcctttggcgattcctcctactgccggattgcaactcatctgtccgatcttgttcatgtccattgtgatcagacaagttttggaacctaaattcgcagcggcggctgccgcttcacaaccagcatgtccggcaccaattacaattacatcgtacttaaaatccattctaccttatttattatcaaacgctgcaaagttacggaaaagttgcgagagttgtatcttctgccggtttttgcttccgaaatttcgaggaggaggcggggcgggcgcaaaaaaacgccgtaattttggattggaaatatgcaagatgtaacgtttctggcttcttctcttttgtgtcaaggcttcgattcctttcaaaaagagatgtaaatgctcttttttgacattctaggcttactttttgtcacttgaaaaagtgcgcggccgtatgatgaaatagaagacgaacggagcgtttggacagaatttgtatcaaatcaacattcggatgtatgttttatacccaacctccactctttctcttgacataaatcaaaaaaataaggtaaaacatgttttttagcataagaattcttgttgttttccaaaacacctctacctttgcagtgtagttgtgaaactactaagatttttaggtattagaaaaaggtaataacaaaagagtagtattagtttataaaattaaggtattagattttaagattagtttttaggaaaaagattgttttgattaggtattagaaaaaaagtagttttcaggtaacaggtaaattgagatgcagaaaaaagaatcccatttatgggggattctttaggtggggcggagttattcgctctttttttattttatgcccctttattctatttttttatatgaggggtgaacttacatactgaaaaaacagatatatttgtaagtcatatctattataaccagtttttgcagtaatttgaagagagtcttttattgtttgattaatcttgttgccgtatgagcgataaagatgatttgatagtagcaggtgtcaaccagaaagataagggaatctggagggacttttataatcgctattatgcggccttgtgctcatatgtcgagaaaatcctgttcctcaccgatgccgtagaagatctggttcaggaggtgtttatatccgtgtgggaaggtaagcgtactttttccgactcccgtgagctgactaattatctttatcgtgcctgctataataatgcactgttgtatatccgcaaccatcagattcatgattctatattgaatggcttgcctcaggaagaagattttgaagacgaggaaatgctgtatgctttgactgtgaaagaagaagctatccgacaactttatttctatatcgaggagcttcctgccgaacaacgccgtatcatcctgctgagaattgaaggacattcgtgggacgaaatcgcatcccggctgggagttagcatcaatacggttaaaactcagaaaagccgtagctataaattcttacgcgagaagctggcaaattccagttattctgtacttcttactcttatcttttattaaaaaccgggctgtgcatccttgcttttgtcggggtgaagtgactgtgatgtggcttatttaagtggatgagccggtatgtttaacaggtaaacaaagcttggttagcatttttagtaagctatatgtgttcgttccatgtctgtaaaccattcggattacgtacgtgagtccatgggatcatgtccgcagagcgatgggaccatgtatgtgaaatgaagtcttgtcggtgtcttattacattggtccggcattgggaatagattaataaagcaggcatttttggttaaatcaaggacctttttatgaagtacagcgcgtcattcttttagtagaaagtgacgataaaatttgaaatatttttgttatcactctgtcgtcactgcttctcgtcacttttatcgcattgtatatcaatgagctaagtccgaaagtgacggatgatgatgaaatatgagtttcaaactccttgataaaagctaaaaaatacatcattttaatagcggtaacggaaaaaaacaaatattttttaagatgcctaattgtcatttattgatggctgaattttgattccgaaaagggaatgatttgttgaatacgttatttttgttgctgaataatgacataatgatagtttttcgttcttttctgttttcgtacggagagtatctcataaaaaataatcatctttttgtcacccatttatggacgttatgtataattatagtaaagcaaagataaaatcctcattagaaatagataaaattatgaaaaagttagaaaacacatatcaagatgcctctttgataaaaaaggctcttttgggagatgcaagcgacaaagagcagcaggtgttggaacaacgtttatctatgcatccggaactgaaagccgtgtatgagaaattgcaggatagtgaggaattaaaagatgcttttaataagtataaagaatattcatcggaaaaggcttacgagcatttccttcaacaaattcaacaaaaagagaattcgtccggtggaaagatccaccgtatccggacatggtggtatgctgccgcagcgatggtagtactgggagtaggaatttctttttatgcagtgaatcattatcaggcagtggaggagtcccaggcacgtatcgcgcaaatcaagccgggtagcaaacaggcagtgctgactttgcccgatggaagcactattgatgtacaaaagaaagatataaatgtaatagtagacggtgtccaggtgaaatacaataaaggggtgctgtcatatcgaccgaccgtcacaacacaacaacacgaagaagaaaacgtcgatgaaagtccggtgaagtcaaatgaactggttataccacggggaggggagaatactgtccttcttgctgatggaaccactgttcatttgaatgccggttctaaattgctttatccggtccgttttgtcggaaagcgccgaattgtgacactggaaggtgaagcctattttgatgtgagaaaggatgaggaacatccgtttgtggtccgaactcgtttcggagaagtaacggtacttggtacggcatttaatatcaatgcttataatgatgcggatgcatgctataccactcttgtatatgggaaagtaaatttctcgacacccgatcagaatactattacgctggcgccgggtgaacaggcagtcgcctcttcccgtggcattgaaaagcgggcggtggatgtcaatgaatatatcggctgggcacaaggtgtatatgttttcaacaacaaacggctgggcgatatcatgaaaaccttcgagcgctggtatgatgttcatgtctattatgagaaggagtctctgcgcgacctgacttatagtggtgacttgcagcgatatggcacgatcaatactttcctgaatgcattagaactaaccggcgatatctactatagaataaacggaagaaatatattgatatatgagaatgagtaatattgagttttgatttaaaaattatgaaaaaaagaagagtctttatgctatgtctttttgcattgagtatggttctcagtgcatgggcacttccacctgatgagaagaaagtgacacttgatttgaaggatgtgccgatggaaacatttttaaacacggtaaaacagaaagctggaatcaacatgctttataactctcagatgtttaaaggagttgaaccggtgactgtaaaagctaccaacgagccttggagggaattgctggaccgcgttctttcacctaaaggtttcacttatgctaccaaagatggtattgtggtcatcaagaagaaagatcagaagacacgtacgttggaaggtaaagtggtggatgaacagggtggcgaactgccgggtgtgacggtgctgatactgggaaaagaaagaaatatcggaacaatgactgatgcagacggtgctttttctttaggacttcctgaaggagatgtaacaattcgtctttcctttgtaggcatgcaaactttggaaatacatactggcaagctcaatcttgataaagtgcatacttttaagttgaaacccgattcaaagcaattggaagaggtggtggtaaccggttatgcaaagatcagcaaaaatagctttacgggtacttctgtgacggttacgtcagatcagttgatgtcggtttccaaaacaaatgtattaggagctttgcaaacgttcgatccctcttttcgtattgctgaaaataatttagcaggttcgaatccgaataatgttccggagttgtatatccgtggacgttccggtattggaactactcagttggatgcgcaaagcctttctaaaacatcattgaagaacaatcctaatcttccgacttttatcatggatggttttgagattagtgtgcagaagttatatgatatggatcctagccgtattgagagcattactatcttgaaagatgctgctgctacggctatgtatggttctcgtgcagctaatggtgtagttattattacaacggtaactccgaaagctggtaaagtcaatatcgattataactttactggaacattggaatatcctgatctgaccgattataatatgatgaatgcgcgggaaaagcttgaaacagaggttgcggcaggtatgtttaaagctaagccggaagccggtgcaagtgagcaaaatcgattggatcaaatctataatagaaagttgaataatgtagttcgtggagtagatacctattggttatcgaaaccgcttcgtactgtattcaatcataaacatagtttgtatctagatggaggaacggatgacctgcgttggggagctgacttttcttacaattcaggagatggcgtaatgaaaggttcttatcgtgatcgtatgtcgggcgggttatctttatcttaccgtttcggtgcttttcaggtaaaaaactatttttcttatacttatactaaatctgaagaatctccttatggaagcttttctgattatacttcaaagttgccatatgatgagtatttagatgagaatgggaattatttggaaaccactacctcatggactggaggaacagaagagaatccattatatgaagctacgttgaaaagttatgatcgtagcaaatcatgggaactgattaataatactgaattattgtggaatatagataactattggttactgaaaggacaatttagtgttacgaagtcaaattcagattcacgccaatttttagatcctcgttcaaaaaagaattctgaaccgttaaatgctaacaatgtgatttctggacagttggatgttgctactgccaatagcttaagttgggacgctacggctactttatcatataaccgaaatattaagaagaacaatttgaacttcttgattgggattaatgctacttcaagtactggcgatagtttcggtatagcttataaaggctttccttctggggagttatcttctccggggtatgcgaacaaagtacctacattaccagtaaactcagatagtaaaagccgtttgttcggtgcattaggaacattcaattattcgttcgataatatttatttggctgacgtttctcttcgttttgacggaaactcggaatttggttccgatcaacgatttgccccattcttttcgggtggtctcggattgaatctgcataattataagtttatgaaacaatttgaatggatggagcgctttaagattcgtggaacatatggtatcactggtaaggtggatttttctccctacgaggcacagacaatttatcaagtaatcacagacaattggtttaaaacaggtttaggtgcaacactgatggcattggggaacagttcattgggatgggagaagacgcataatatggatttggggttggatgttgacatgttcaaaggtttacttcagatgaacttttcttattatcgtaagaaaacagtagatctggtgaacagtgtgactttacctagttctacagggtttacctcatacaaagacaatatcggtgaagtaatgaataaaggtgtcgaaattcagttgcgaagcactatcctgaattcaaaggattggtatgtggcagcctttgtcaatatggctcataataagaatgagataaccaagatttctgatagcctgaaagagtataataagagggtacaagagaaatatgctgattataattccggtattaataaaggtaaagccgaatatagtgctacttatttacagtatgtagagggtgggtccttaacgtctatttttggtgtaaagtcgttaggtatcaatccggcagacggtagagaaatctttgttcgtcctgatggaacgattacttacgattggaatgcagctgatcaagttgtaattggaaatgaagagccgaaacttcaaggtacctttggttttaatatgcgttggaagcaattctccgtatattcaacatttatgtatgagcttggaggacaacggtacaattcaacattggtaagtaaggttgagaatgcatatatacaaagtagcaatgtggatcgtcgagtattaacaggacgttggcagaatcctggagattgtactccttacggacgtttgcaaacagatggagtggttgcagtaactcgtcctacaagccgttttattcaggattacaatgtcttaacatttaattctctgacggtaggttatgactttaatgcagaatggttgaaaaaagcacatattggcttattacgtgtagaattgtcgggtaatgatttattccgtgtttctactgtacgtgctgagcgtggtttggactatccgtattctcgttcttttgcagcttcggtaaagatgagtttttaataaacaatacttagagtagatgaataatatgaagaaagtatatgcaatgatattactgacagctagcttgtttacaacaagttgtagtgattggttggatgtagcaccaagtaatcaagtcaatggcgataaacttttcgaagttggcgatggttatcgtaacgctttgaatggtatttatttgaatttgggaacctcctcaatgtatggtaagagtatttcatgggggtttatggatgtaatagcacaatattatcagtcgggaagtagctatatgaaaagtacctcgtcctattataaagctgctaattataaattcgatgattcagatgtaaaaagtattatttccagcatttggtctgttggttataataatatagctaactgtaataacttgattgctaatgtaagtgaagcatctccttctgtgtttgcagaagacgagttggagaagaatatgatatggggagaggcattgggattgcgtgcgttaatccatttcgatatgcttcggatgtttgctccttctatgcttaaagacgatggcaaagcctatataccttatgttgatgtatatcctactattgttccttcttatgaaaacaataaggagattttgagaaaaatagttaatgatttaaaagcggcaaaggacttgttggcaaagtgtgatactattaaagaaaacaaacattggatgtccaccgaaaatcgtatgttggctgttaatagtggtactagtggagaactggctaaggatgtattttttgcgtatcgtggatatcgtatgaattattatgcggtaacagcgatgttagctcgtgtttattgttgggctggcgaatatggtaatgcttacaaagaagcaaaagaagtagtagatgccacttattcaacaggaagcacgtctacagcttcttgttttaacttctctaatagcttgaccactaatcggaaagattataatagtataattatgactttctttaagtctacttgctatgaagattatcttccgtatatgactaaagggaatgatgtggtattagttgtaaatactacaaatctttttggtgatgaagctggtgctgacgatcgtaatcttgatttgtttggggactgggatggaggagatattaagtattcctttaaatatgatataaaagaaggtacttccggtacagacatgattccggctatacgcttgagcgagatgtattatattatgggtgaatattttgcttataaagatgagttctctaaagcaggtgagatgttagataaagtacgttatgcgagaggtattagtactactaatctagcatcaagtattggttctctggaagtctttcatacacatttgataaaagaaatgcgtcgtgagtttgtaggtgaaggacagatgttctttcagtataaacgtttggatcagaaaccgaaagataatgtagtctttgtatttgacaaaccgaataatgaagacatttaatattgctaatcaaaagaagaaacgatgaaaaaaaatatattatttgctttaatctctctttgtctttgggcgtgttcagaggatgaaataaaaccctatcagggagaacagtatctttattttagtcaattgataaatacgacaaatgattacgataaagagaatggatatatggaggtgtcattcaataattatccgacgagcgaagaaataacggtaaagattggtatgagtttgattggtaagcctctcaacgaagatactccatatagtgtagtagtggtagaggagaatgaaaaagaagatcctaccccaaatgcggcttcaaagaattttcgtttaccaattaatccaaaatttggagcaggattgtctaatgatacgctagaagttactttggtgaagacggatgatttgaaggagaatgtaaaattgtgtctgaaactggttccgaatgaatatttccaaggaacaatgcaggaatatgaaaaaataaaaattgtatttaataatgtggtaagtaaaccagagtggtggactactcaggtcacaagagtatatttaggtacgtactctagaaaaaaatatgaagaatttgtgaagtgtacaggagtaactaatttcggggcattaaatacggctgagaagagagcttattcattgacatttaaacgctatattgcacagaataatgtgatggatgtggatgctgatggtaaagaatttccaatgactgtgcctattaattaataaatagactacttgaatatgaatatgaaaataatatttatcgttatgttccttttaggtatggcatcttgttatgatgataaggggaattatgattataaagaaatgaatgatatagaagtctctgtttcaacagaaacctcttattattccttgggagataaggttatctcaaaaccggaactaacttttgctttgggacgcgaaagtcagaacttagcttatgaatggagctatgatggacatgtgatagctcactctaaagatttggaatgggtggcggatacggtagccaaaaataaagatctgcgattggcagtattggataagtccactggagtatcttattttggatcaacgacaatctcaattagttctccatatgtgaaagatggttgggttattctttctgaaaaggatggtaatagtatgttgacatttatgaaattccaaacagaagagggagtacttaaacctgtagttactcgtgatatttatcgaatgataaataaagaaccgttaggtagtcagcctgtttcgatatatcctcattgggtagagcaatgggatggtgaggatccaggtataagttggctatggatagcgcaaaaaggtgggcaaggagctgtagacgtatcaggtagtagttatcagcgtgaaggagcattgtcacaaatgttcttggagggttatccacaagatttagtaccggaagcagtgattgatttgcagtgtctgacgatggctgtcggcgaggacggtacaatttatacacgtgtaaaagagagtaatcttctttttaatacgagccgttttatcaatactccgctaacatcggatgcagaaggtaaagtgaaagttgacggtagtatgattgcttatgctccattttcgggccatggaggattgctattgtatgataagaattcaagtcaatatttacacgtaacagataaactgagctctaatggaacttttaattcgggcaaaatactaacattgaatgtggatgaagcgacatacacaaatcatcctacttatgctcgtttagataatatgaaagattatacagtacattatgtaggagcgtgtgaatcgggctcttatgattatggtaagatgatgtactttgcagtaatagagcataagcagtctcataaattctatatccagaagtttgcggtaagagacttttccggtagtactacagtaactagtttggctacaacgtatgtgtcgcagatggaagcacctgctgagttggggcagataattgatggtacttcaaagaatagtttctcattgttccgttatcaagattcatggcaatacctttttattagtaaagggaacgacctatatctgtattatctgaaagaaaatatgttatttaagtgtgctacatttaactcttcgattacctctgttgatacacagttctacaataatcaatatatcattgttggtttggagagcggagatgcctatattatgaaaggatatacttacaacacttctgatgaatatactattgataaatacgtgataaataagggacaaacaattcaagtaacggaagttgatgggaaatttgttctatatcacgaaaaagatttaggacgtattgtgcaggtacgttataagcctaatacaggcaatggatgggatgataattttgattgattataaacttaaaaacgataaaaccttgaaaaaactgtatttacttcttctggtcgcactatgcggggctatgatcagccccgctgtggctaagaagaaaaacaagaagaaagcttctaccgaagcgactacaaagaaagagaagaaggaaaccaagtacgacaaactgtttaaagacaagaaagtcaccacggctaaaggtttcattactcttcacaagttggacaataaaatttactttgaattgccgattaaggtgatgaatcgggatattctacttggttctaccatcgtggaaacgaccgataaccagttcggctgtgtaggagagaagtcaggtgatccttttctgattcgttttgtgcaacgcgactcaactattacattgcgtcgtgtacaggcaggtcagttctctgaagatcgtgaaatcaagaagcgcttggtaagcagtaccatgccggcaatcgctgaaacattcgagatcaaagcatataataacgatagcacggcagtggtattcgatatgacagactatctgctgagcgataaaaagaacctttctccgttctcaccatattcaatgatggagatgatgggagccgatattagtaaggattttgagaaggaaagctcatttattcagggagtcaaaggctttgaggataatgtgagtatacgttctttactgacctacaaaatcagcgtgggtatgaagggaaattatgcagtgaagaaaatgccgtttactgcggttatgaatcgtagcttcattctgttgcctgaacaaccgatgcgtccccgttatgctgatccacgtattggtatttttgaacactctgtagtagaatttgcttccgaaggtcgtgggttgcgtactcgtcacattgctcacagatggaatctggagccatcggattcagcagcctatctccgtggcgaactggtagagccgaagaaacctattgttttctacattgatgatacttttccgttgagttggaataaatatatccataaaggagttgaagtatggcagaaagcatttgagaagatcggttttaagaatgccatcattgcaaaagatttcccgaaagatgatccgaacttcgacccggagaatatcaaatattcctgtatacgttatgctccgtctacggtggccaatgcgatgggaccttcttggatagatccgcgttccggagaaatcattaatgcatctgttacggtattccacaatattgtgcagttggttcagtactggcgcttcttgcagactgcccctgctgatgaggaagtacgtgatgttgttttgcgtgaagacttgctgggagattgtatcgcttatgtgctctcgcatgaggtaggacacacattgtcattgatgcacaatatggcaggttcttcttctatccctgtggaatctttgcgtgatccgaagtttactcaggagtttggtacgacttactctattatggactatgcccgtaacaattatattgctcaaccgggtgataaagagagaggcgtgcgtttgactcctccggaactgggagcgtatgattattacgctatcgcctggttgtattcaccgatctttgaggctaaaacggcagaggaagaaattcctatcttggataaatggatcagtgagaagtctggagatgttaaatatcgctatggtaaacaacagttcagacgtcgttttgacccaagttcagtagaggaagatttgggagacgacccggtgaaagcttctgaatatggacgtcgcaacttgcaatatctgctaaagcatatcaatgattgggtagcggataaggataaggattttgagttccgcacggctgtttatgatgaaattgtatatgcttacgtacgttatttgactttcgttttgggagatatcggtggtatttatctgaacgaacgctatgacggtgatcagcgcccaagttttaaaactgtatcgaagcaacaacaaaaaaaggctctgaatttcttattgaatgaactgaaggacctttcgtggctggatgcacgcgaaacactgaaagaattccctatccgtacttctgtggccatgcagatggaagatgcaattattgatggtatcttgtctcgttgtggtgcggtggctatctgttcgggtaaggcgacatcagctccttatactcagaaagaatatcttgccgatatagaacgttttgtatgggctcctacccgcgccggaagaaccttgacagaaacagaaatgcgtttgcagatgaattatctgacgaagctgattgaaggttcggttgcaggggttgcaaagaatgctacccgtaaaggtatcgcagatatgtatgctcacattgaagtgcccgaatggctgaaagctgcttcgcgcgaacgtttcggaatcatctcggaggaatttatgggatgttttaataacaagcctcgtgagatgcaggctgcccgtttggaggaaatcagtggatttgatgatgatgtagatctgaaagcaccgatcgaaccgatggaacatatatactacggtgagttgaagaaggttcgtagtctggttgcagcaagtgcttctaccggttcggctgatacacaacgccactaccgcttattgttgtacaaaattgaccaggcattaaaatgataggaagtatgagaaatagatatagtaagatactttgtttattgcttctttttgcatgttgcctgccacaggaaggaaatgctttctggccttttaaaaagaagaaaaaagaagataagaaggaaaatctgacaccatatcagaagctgttcaagaataagaaagttcagacagcacacgggctgatgactattcataaggtggaagggaaagtgtatgtggagttcccggttgccatgttgggacgtgagatgctgtttgcttcttctattgaaaatacgagtgacggtggtgaaggagctcccggacagttagggggtaccgacgtacgtttccgttttgagatgatcgattctactcttgtggcacgtatgcctttattgagtaagccggtaaataccagtggtgatgcttatatcgcacgtgcgttggacaatgcgcataatccgggtattttcaaaagctttaaggtattggcttgcactccggatagttctgcacttgtggtagatatgaagggattatttttggagggatctgcttttaccaaacctttcccttcgacatcggctaacggatactatggattcgtgtcgcgcgatcattctctgcaatcggataaatctgctattttgggtgtatcggcttcagaaaatcatataagtgtacgtgaagagttgtcatatactgtcgaccatacgctgatgggagcatacaatatgtacaaagacgtaccgttgacagcggtcgtcactaaaatgctttgtattctgcccgaggagccgatgactcctcgcctggctgactcacgtttgggattgactacacaattgaaaagtgattattcaggggcaactcaggaagtgaagagtatacgctatgcaaaacgttggcgtatcgagccttccgactctgctgcctatcgccgtggcgagctggttcggccagtcaaacaactggtgttctatatcgacagtctgatgcctgtcaaatggaatccgtatatcaaggctggtgcggaatcatggaataaggcatttgagaagatcggctttaaagatgttatttgtgtgaaagaattcccgaagaatgacacattgttcaatgcaaacagctttgactgtatgacaatacgttattcggcttcttggctgaattcggcacagacaacgatacactcagatacacgtaccggtgaaatattgaacgcgtctattctgattaatgcaaatatgatcagtgttcagtatgctgaccgtataggggccactgttgctattgatcctcgtgtgcgtactactgttttcccgcaggagatacagggtgagttgattcaggctgctattgctcaggctgtaggaaccggactgggactaacaatgaactggggagcttcctgtgcttatccggtggattcgttgcgttcggcaagctttactcaaaagtatggtctcgcttcttctgttatgggaggcgtaatcattaatgacgtagctacggaggaggatgttcgtaatggagtgtgtctggttaatgcaaagcctggtccatatgacgaactggtgattaaatatttatatcagcctatctatgcttcttcattgcaggaagaaaaagagacattggatagctggattcgtgaacatacgggagacccatattatgcttatatacgtaatcagtcacgttttgattctgatcctcgtaatagtcgcggaagtctgggagatgaccatttgaaatcattcgactatatgcttcctaatgttcgcaaaggatttgaaaactattatagttggtttgccaaggaagaccgcgattttttaatgcgcagacgtgtacactctgcccttagtgaaagactgagcgggcgtatttatgcaatactgagttatattggcggtatttacttgaatgatattcgcgagaaggatgcgataccaagttactcaatggtagatcgtgagaaacagaaagcagctttgagcaaggcattggaactggcaaagaatctggattgggtggacgataccgctcatttgaatgaatttgaaatttcagataagaaggctgaccgtttacgtttggatatctttaatggtattttcggacgtctgccttatgtcgaggtttgtacagaacgcttcccggatgcagcatatactgcttcggaatatctagatgatatctatggaattgtttgggaaggtgtcttgaagcatcgtccgttggagaatttcgagagagcactacagacagcgtttctggaaagtattatttcaacatcgacagcaactgcgcctattggtagtttcaaagcctcaaaaacaggatttgcggctacaggcaaaccggggatcaatctggctgctttgagaaatggcggaaaggtggatatgaagatgcattcattgcagaatgcagaagaagtagcaggcttctcttcaattccgccgatctataccaaccagacaaaaatagctgcttactattttgacttgttgatgcgtacgaaagacatgctcaagaaagcaatttcgacggctcctgaggcagatcgttctcattatgacctgttgatctaccgcatcaataaagcaacggaaattgaataaatctctattacataaactctctcttaattaatttgtctctatgaaaacaatattgtaagagatgtttttaaagatttcttctatgcaatattgagcatttttcacccgggtttacattgtcgaatgtaaatccgggtgaatcttttataggcggatatcttttggaaagtaccatacaactagattgtccgaaagaaaaatatcagtctttctgtatagaacattattatttaatttgtatttttggcgcaaaactcccgaaatgactaacaatgagatttccatagaacaaattaataagttggatgcggctgctttccgactgctttataagaactattataaagcattggtttgctatgcaataacaattgtcggagattcagaatctgcagaagatattgtccaggagttattctccactatttgggagaaaaagatgtttttccggtctctggcttcattcagggtttatctgtataactctgtcagaaatgcttccttggattatttgaaacataaggatgtggaaggcaactatcttcagaagatgcttgatagtcattccactacatttaggatggaagaggaggaagagggcttctttagtgaagaagtctatcgccagcttcttcagacaattgatgcgctgccggatcgatgtagggaagtttttttgatgtatatggaaggcaagaagaacgaggagattgccactgcactccatgtttctcttgaaactgtgaagactcaaaagaagagagcaatgtccttccttagaaaaaaattaggctcctatcattttctattattacaaatgttacttccctaaaaagaagcataacactcaatccgctttacttgttaacacctgtttgcaatgaacaaaatgttcgttgtttttcttgattattatacaaaaagaacggtcttctaaataaataaagtatcttttgaataaaaaaacttcagaatcctgtccctcattttttctccttagtcgtctttactataaataacctgaaataatatgataaagcgtaaaagaagtataaattctattatccatgatcagttgctgggatacgcttcggaagaagataaaaaacagttgcagtcatggcttgatagttctcgagaaaatagagagaactatgatcgtctgatgcgtgaggcttgtttgattgacaggtataaacagtttgcccaggtagatgaagcacgtgcttgggaaaggtttcagaaaaagcatttctctattcgctctgctcgttggatcaaaataggacgctatgctgcaatcttcttattgccgataatcggttttgcaatatggttttggactttgaggctgatggattctcagccggtgatttcggatgaagttcgtattgctatgatccggtcggagaagatgggtaaacaaaaggcaacactggttctggcaaatggacagaagatggatttaaaatcagtgcctgctaagcctttacaggattcggtggaacaagtgcctgttgctcagccgtctgtccctgagactgatgtgaacgaatcggaagaggtctctgttgtagaaaataataagttgagtacttatgatgacagtgaattttggatgacgtttgaagacgggaccagagtgcatctgaattataatacgacattaaaatatccaccacattttggtactaccactcgcacggtctatttggatggggaggcctattttcaggtagccaaggatagcaagcgtcctttccgtgtcattacggcgaatggagtggtcaagcagtacgggacaactttcaatgtaaatacacatgtgcctggaataacgaaagtagtgctggtgaaaggttctgtaagtgtgcttcctaatcagggaggggaatataaaataaaaccgggggaattggcggttcttcaggctgatacgcaagatgtacaaattagcgtagtggatatcgagccgtatatcgcatggaacagtggacgttttgtttttgataattgttctttggagagtctgatgaatgtaatatcacgttggtacaacaaagatgtcgtattcgaatcggaagataccaagaagatacgttttacaggagatattgatcgctacggctcaatagagcccatattgaaagcgatacagcgggtgactcatctggaaatggaaatacaggggaagaccataattataaagaaataaacatattaactactattaaaaaaggaggacgacatgcaaaaaaagagagctcgagaacgcattatcatgtttctctgtattatttccttgttgtttacaccggtgttggctgcatcgcaatctaatgcaatgagggtatccttagatcttaaatctgcaacagttaaagaattttttgatgctgtaaaagtacagactggcctgaactttatttatagtacggagcaagtgaagaatatgcctcgtatcactattcagagcaatagtcagcctatcagtgaggtgctgaacaaagtgctggcaaataccggatacagttatgagatagaaggaaatattgtaaccattgtatatcagcaacctaaagagaatgtccgcacggctacgggcgttgtggttgatgagggagggttgcccttgccgggagcttatataaaactctctaaaacggaacattcgacgataactgataatgaaggtaagttttctattaatttattccatcagaaagagcctgtcctgattgtctcgtatttgggaatgattgtacaggaagtaaaagttaccggtactaaacctatgacaatcgtgatgaaatcggatgtaaagtcaatcgatgaagttgtagtaacaggttatcaggagattgacagacgcaagttggcaagctccatatcctctataaagggagctgatctgattggtggggagtatctgtctatcgacaaaatgttgcagggacgcctgccgggtgttgctgtgatgaatatgtcatctactccgggagctgctcctaagattagaatcaggggatcttcctctattacaggaaatagagaaccggtatgggtagtcgatggaattattctggaagaacctgtcaatatctctacagaggaactgaacagtccggataagataaatctgatcggaaatgccatcggttcggtcaatccggaagatattgaacgtgtggatattctgaaagatgccagtgctactgctatctatggtatcaaagcggccaatggagttattgtggtcactaccaagcaaggaaaaagccagaaaccgagtatctcgtataccgctacattggggataacagctcctcctacttacgataaaatgtttcggatgaattctgccgacagaattgatatgtctatcgaaatgcaggagaggggattatctttcggaagttacaaaccttcggatattggctatgaaggggcattgcaacatctgtggaataaggatattacctatcaggaattcttaaaccaggtgaagaccctgaaaggattaaataccgactggtatgacttgctgttccgtacagcatttacacatcagcattcggtatccattacaggtggaaatgaccggagtaattattatatgtccatgggatatgcgaataataacagtgtgacgataggggaagggttagagcgctataacgtactggctaaaataaataccagaattaaccggaatatacatttgggattaaaggttagcggttcgctttccaaagccgaacatcctcatacttccattgatgtgtatgagtatgcttataatacttcacgggctattccacttcggacagcttctaatgagttgtatttctatgcgaatgaggctggacgtaacggagtattgtcttacaatatcatgaacgaactgaatcatacaggaaacaagaatgataattccgctatagatgtagctgtcaatctggattggaaggttgcttcatggatgagattttcatctatattaggactgtccagaagcaacgtgacacaagaaaactggggtgatgaacaatcatattatatttcttctatgcgacaaagtccctatgggaagatgttgccgaatcccattgaagattctgaatttgccgaaagatattgtctgcttccgtttggaggagagttgatgacgaccaatacacgtaatacttcttatacatggagaaatagcctgtctttgatgcaaagtttcggaaaacatgaagtttccggaagtatcggacaagaagtcagatcttcaaaatatgacggattaagctctacgcaatatggttatttgcccgaaagaggtaaaaagtttgttgatattgacccgacagtctggaaaagatacggtgctttggtaaagagtcatccggatgtggtgaccgatacaaagaataatgtgatttcattatatgctacggctgcttatgtttatgacagtcgctatattctgaacttcaatatacgtactgacggttctaataagttcggtcagagcaagagcgttcgttttctgccaatatggtcagtgtctacacgatggaatgttatcaatgagaagtttatgaagaacgtcgatttcctgaatgatctggcaattcgtgcctcatacggtatacaaggtaacgtgcatccggatcagacccctaacttgattgctagtttggggacattggagtcaatgccacaggagtatatttcaacattgtataagctgccgaataataaactgaagtgggaaaaaaccaattcgtataatattgcaatcgactgggcattctggaataacagaatctatggatcgcttgatgtatattacaaaaagggagtagatcaggtggttacgaaaaacgtagctccttctacaggtgcgtcaagtgtctccattaatgatggtgatgttgagaataaaggttgggatttggctgtttcttttgttccgattcagacccgggactggatgtggagtttatcattcaatacaggtaaaaactacaataaagtgttgaatgccgggaactcagcgatcacttggcaagactatattgcaggaacattagtgagcaatggcaatgcgataaatagtttctattcttataaatttgataaactggatgatcagggttttcctacatttaaggatattaatgagaaagatgaagaaggaaatgctgtggttcattctttgcaggagatgtatgaccgtgcttttgttctttccggaaaacgtgaacccgatctgaccggtggattctctacttatttgaaatataagaatattacatttaatgcgttgttctcattcagctttggcaataaaatgcgcttgaatgatttgtatgagtcctccggacagcggcttccttatccggatcagaatatgtccagtgaatttgtgaatcgttggagagagccgggtgatgaagacagaaccattataccggttttatcggataagagtttgcagatcaacgataaggatgtgacctatcgtattgcggataatggatgggatatgtataataagagtgatatccgtgtagtttcaggcagtttcctcagatgccgttcgatgtctattcgctatgattttaaacgtgaatggttgaaacctgtctatctgaaaggagcaagtgtcagctttgatatgggtaatgtatttgtcattaaagataaagcgctgaagggcagagatcctgaacagattggatttggctcaagaagtataccaccgcagcgttcttactcacttcgctttaatattactctttaataatgaatgatgatgaaaaagtacaatttatatatcatattgcttatctgcacattatcgtcgtgcagtgactttttggaagaaagttcacaagatttgatgatacccagatcggtgaaggattacaaggaactgttcttcggtgaggtaatgaaaacgaatgaaaaagacatacctcatccttatctggaatatatgacagacgatgtgaaagaccaatgttactatggaaccagaccacaagtcatttctaatgatttcagagaatatgtttgggcatattatacgtggcagggaaacccggaagtgggaatttcaaatgaacttacgccggatgttgcatggacagtctattatcataagatattgatgactaatattatactggaccagctttatactatgaacgggacggatatggaacgtcaggatttagcaggtgaagcttatttcatgcgggctttctcgtattttatgcttgctaatttgtatggaaagccttatcatcctgcaacggcaaatgaagacttatgtgtaccgctcaataaagaaatcggcttatcagataagatgatgaagcgggccacgaatgcagctgtttatgcccaaatggaagaagacattaataaggctatccagtgttttaaggctataggaggtgagaaaactattttccgtcctaacttgccgagtgcttatctattggcatcacgtattgctctttttcaggagaaatatgatgagaccattctttattgtgactcggtctttaaggtcgcgactcagccactttacaaacttcaggaaaaaaaggaccactatttcttttctcttgctaacaaagaaatcttgttatcctacggacttacatcacttgagacgcatatgaaagaagatttcaggtatacggggaacttggtggtttctgatgatttactagcgctatattcggaagatgatttgcgtcttacgaattatttcaagaatacaatcggcaaccagaccagacctactaacaaacagtatagtgtctatacacctattaagtggactaaaaattctgctacagtctatgccaacgccttgcgtatttcggaagcttatctgaatcgtgctgaggcttttgctgaacttggcaatacgaacaaggctcttgctgacttaaatgagctccgtgaaaatcgtatgaaaccgggaactccgccgttagctgttgatgaagacggaattgtagcaaccgtacgtaaggaacgccgtagagaactggcgtttgaaggattccgctggtttgatttgcgcagatatggctgccctcctcttacgcatacttacagttcaaaggagaacgagggagcaggggatgtcttcgaactgaaagagaaaggctcatacgtgttgccgattcctaagagcgaaagagagagaaatacggaaatagaaatattcgaccgtccgaatagtgaacctgttaataattgatcgattatgaagaaacttatattattaatttgtatgttggcaggtatgtcttcttgttatcatgaagatgcgttaatcgttcctgagcaaccggataaatataacattttgacagatgacccgtcagatccgacacagcattttatataccagttttatcagaaatatcagactgtgattataactaatccgactgaggctgattataaattcaactttacagcgaataacggaattaaaataactgctcccgaacaaaagcaggagattattgatgaagggattgagtttttgcaaaaggtattattgaatttgtactcggatagttttttaaagaagaatttacctttttctatattgttatctgaagaggtccggatggcctcttatggtgagacaaccatcatgaattgctatgctagtagcagctttatagccttaggtaatgtatcatcttctctgaaaacaatgaccgatgaggagtttgtgaaaatcagagcagatgtgaatgccagcttttgggcaaagtatatgtcggaagtcagaggattgtttactatttcagatgctttttatgaagctagtgaagaagttgaaccgaaattgtacgacccgaactggtatcgttttaaaggaacggaccctaatgaaatcgatttttataagtatggggtgattacttattctgagaactcctatattgatgaagattggccggattttaattccatttatgctcctttaaagagtgaagaccttgcgcaatggatgaatttcgtctttgagaaaactcctgccgagattcaggaaatctgcgataaatatccggtaatgaagaagaagtatgatgtgattcgggaagctatgcttgaaaacggattcgatctgtccaaactggaactatagaacttaaaaacagcatgatatgaacaaaattttcaccttattacttgtaggagcattaactgccggagcggtaactgctaatgccgaaagtcagatttttaaaaagaaaaagaagaaagcaaaagcggaaacagagcagccggcggcaaaagattccacaaagagtagtatgaccgaatacaaaaaactactgaaaggagccaagacgattgatggcatgtttaaggtacacatcgttaaggataagtattatttcgaaatacctaaagacttgatgggacgcgattttatgattgcgtccagagtatcgagtaccagtaacaataaagatatagctgccggacaaatgccacgcaatccggtactggtaactttctcggcagataaaaagaaaatctacatgcacaaaaagatggtgcgcaatttgtgtgacaccacttccaatatgtatgctgcttttcagcgcaacttctcagaccctatttgggaagcatataagatagaaagtctttcaccggactcttcagcatatgtcatcgatatgagttcgcttttcataacggatgtacccgaattcagcccgtttcgttcggaaaatataatggatgtattgatgaagagaaaagcactgaagggaagtcttgcttcttccaaatcgactattctgggaatgaagtgttttccgctgaatataaacatcaagacgctgatgagttatactgttgacggaggaccgttcactgtaaccatgacgcgtaatattattttgctgccggaggaaattatgcgtcctcgttatggagactcgcgtatcggttattttgatgaaagcaagcggttttatactgaaaagaaagatggtttgcaagaactgacttacatcaaccgatgggatttgcaaccaaaaccagaagacttggaacgttataagcaaggtgaattggtggaacctcagaagccgattgtatattacgttgatactgctatccccgacaagtggagagattacataaagaaaggaatagaagactggcaggttgcgtttgaggaaataggatttaagaatgcgattgtagcgaaagactatccgaaggatgatccgaactttgatccggatgatattcgttatagctgctaccgaatgattaccactccgatacaaaattcaatgggaccttcctgtgccgatcctcgttcgggtgaaatcattcagggtgacgtcttgttttattcaaatatcattaagttgttgcataactggcggtttgttcagactgctactgttgaccccaaagtgcgcaaggctgtgtttgatgacgagacgatgggaagctcgttacgttatgtagcagcgcatgagatcggacataccctgggactgatgcataactttggtgcatcttattcgtatccggtagactcgctccgttcggccactttcactcagaagtatggtacaactccgtccatcatggactatacgcgctataattatgtagctcagccggaagacaaaggagttgctctgactcctccgcttttgggtgtatatgataagtttgccatcaaatggggatataaacctatatttgatgcggcatctcctgaagatgagaaagctactttgaacaagtggatcaaagagaaagagaatgatccgatgtacaaatacggtccgcagccttttattaatgaggtcgatccttcttgtaaatctgaggatttgggtgataatgccgtgaaggcaggaagatatggcttaaagaatctgaaacttatcatgaaaaacctgccggaatggacctatgaagatgatcatcaatatgaacgcctgacggaatcatatcaggaagtgattatgcagatgcaacgctacttactgcatgccatggtgtccatcggtggaatttactttgatgagccgagacgggacagcgaaaagcctgttatccgttttgtgccgaaagcagaacagaaggaggcattgaagtttattatggaaactatgatggaactacccgaatgggtacttgacaagaaggtgattgagtataccggtccgacttattcgccaagtactttgcagtcaatcattatgaatcgtttgttcttcacatacattacatccagtcttgttttgta

SEQ ID NO: 4567 - DNA, 164494 bp, Unknown
  gut microbiota DNA sequence
cctgcaaattacttatgtggaaaagttgttgaaagaaggagggatgctgaaacaaaaatcttctccattctcatttaaagacttgaatgaagttgagaaacaactgcttacggataatgtcgattggacgaaagccggctttgaactcaacccgctcggaagtgtggatatggttaagaatccggctatttatcagaaggtaatggatagctatagtttgctgcgaagcaaagtaaatacgggtgatgctactacccgggcacattatcaaagtcttgtctttaaaataaagcaagcgttaacggaacaataactatctctcttagatacttgggggcacctcgtcgcagtgattgtggcggggtgctcattttatccggtcaatggcttttattgaatcgccgactatcgcattgccaacgccttattctccgcctcttccataatttccctttctccgggacctttgtcattgataccgcagagatgaagaataccgtgaataataacccggtgtagttcatcatcataagctgccccgaattgctcggcattggtgcgtatcgtatccagactgataaacaggtcgcccgacagacgatcaccctggcaataatcaaaagtaatgatatccgtgtaataatcgtgttgcagatattgtcggtttacctccagaatcttttcatcggagcagaagatataagcgatttcaccgagtctttttccataagaggcagctacattctttatccattctgtagtttcccgttttttgatatcaggcatcttgacgccttcggtttgataagttacagccataattgagtctatgctttaaaagaaaaataaataactgattaagatggcggctataataccggagaagtctgcaatcaagccgcaggtgactgcattccgggttttactgattccgacgctgccgaagtaaacggcaaggatatagaaagtggtgtccgaagctccgcgtactacgcaactcattcggcctacaaacgaatccggtcccatctctttcatcgtgtcaatcatcagcccattggcaccactgccgctgagagacttcatcagcgctgtcggcaatgcacccacaaaactggtatccactccgcacagaccgactacataaccaatgcctcccacgaggaaatccatcgctcccgaagtacggaatacagcaatgcctacaaggaaggcaaccaggtacggaatgattcgtacggctgtcgtgaagccttctttggccccttctacaaaagaatcatatacgttaatcttcttccggacccctgtcagaataaacaggatgatcaccccgaacagaagaatatttgctatcagcgtagagtaagtacccatttcctcacgcgaaatattcagaaacagataaatcaatccggagaagaaaaggcagataacgcccatcaatatcaggataggcttgttgatcagattgatcttctgggcgatactgacggctatgacgccgaccagagtcgagataaaagtactcagcaggatagggataaacacatccgtaggttgggcagcccccatctgcgcacggtataccatgatactgatcgggataatgatgagcccggaggtgttgattactagaaacatgatcatcggattggaagccgtatctttcttcgggttcagttcctgcagttctttcattgctttgagccccaatggggtggcagcattgtcgagtccgagcatgttggcggacatattcataaagatggaacccaataccggatgccctttgggaatgtccggaaacaggcggcagagtaccggactcagaaagcgggcgagtgcattgatcagtccgctgttctctccgattttcatgataccgagccagagggccagtactccggtcagtcccagagatatctcgaaagcggttttcgaagagtcgaaagttgagttcatgatagctgtaaatatctccgtatcacccagaaaaattacttttatcagggcgataatgaaggcgataacgaagaatgctatccagatataatttagaaccatagttgattgcgtgtatatagatgatgcaaaagtagttattacgttttaaataaactaattgttttcgggcaaaagagtagaagaccgaaaccggtcttctactctttcactctattcttcaatagaatgatgcgttattttaaaaaaaaggggtaaatacggcactttttagggataataggcttttatggtcattaaataacaggggggagcggaaagtagctaattgttattgtgtttatacacagccaaatgtaggttgctatattctcagagtattctcattgcggtgagaatactttgggaattgaatctatcagaaagttatgcttatgatcaggggatgaagttacttaaagaaggctgaatggcatcttgtcattgtatcaattttgagatttattcttcataattcctcttggaaaagagaaatggataatggccggaggtttttattattctttcttatatcgaaaatgaatggatttctctatctttgtctcctacatttcaagaagaaaatggaacaagaagattttaacatacgcgaacatcagctgacttcacgggagcgggattttgaaaatgcgctccgtccgttaagctttgaagactttagcgggcaggataaggtggtggaaaaccttcgcatctttgtgaaggcggcacgtctgcgtggcgaagcactcgaccacgttctgctgcacgggcctcccggattgggtaaaacaacgctttccaatattatagctaacgaattgggagtaggctttaaagtaacttccggtccggtgctcgacaaaccgggcgatctggcaggagttttgacgagtctcgaaccgaacgacgtgctctttatcgatgaaattcaccgcttatcgccggtggtagaagaatatctctattcggccatggaagattaccggatagatatcatgattgataagggaccttcggcacgcagtattcagattgacctgaatccgtttacgctggtcggtgcaaccacccgtagcggattgctgacggctccacttcgtgcccgttttggtattaatctgcatttagagtactatgacgatgatattctgagtaatatcatccggcgttcagcttccatactggacgtaccttgttcggtgcgggcggcatcggagattgcttcccgaagtcgtggtacgccccgtattgccaatgctttgcttcgtcgcgtacgcgattttgcgcaggtgaaaggttccggctctatcgatacggaaatagctcagtttgcgctggaagcgttgaatatcgacaagtatggtttggatgagatagacaacaagatactttgtaccatcatagacaagtttaaaggcggtcctgtcggtctgacaaccattgctaccgctttgggcgaagatgcgggcactatcgaggaagtatatgaacctttcctgatcaaagaaggttttatgaaacggactcctcgtggacgtgaagtgacggagcttgcctataagcatttgggaaggagcctctatagcagccagaaaaccttgtttaatgactgatagtttgatctgacggctgtcggtatggagagtgttggcgacaattaaaagcaggctttttgaggaatgtttaaacagataactgattttattgaatgattggagtatgaagcagtggagtatcttacttgtatttctctctttgagtctgtcattatcagctcaacaaggttatgagaaggacgtatttgtctcttccacaggagattctttgccttaccggatgattcgtcccgagtcaatgaaggcggggaagaaatatccgctggtcctgttcctgcatggagtcggtgagcgtggaaatgacaatgaaagacaactgacgcatggcggacagatgtttctgaatcctgtcaacagagagaaatatccggttttcgtacttgttcctcaatgtccggcaggtagctactgggcttatacggaacgtccgaaatcactgtttccggcagatatgcctgcaggacaggagatgagttctcttacccggactctcaaacaattgctggatacttatctggccatgcccgaagtcgataaaaaacggatatatattgtcggattgtcgatgggagcgatagggacgtatgatttggtggtccgttatccggagatttttgcggctgccgttcccatttgcggatcggtgaatccggaccgtttgccggttgccaaagaagtgaagttccgtatatttcatggggatgccgatgatgtggtaacagttgaagggtcgcgtgaagcgtacaaagcactgaaagctgctggagcaaaggtggaatatatcgaattccccggttgcaatcatggcagctggaatcctgcatttaattatccgggtttcatggagtggctgttcaaacaaaagaaataatattattcattgataataaagagatctaaataaacatggcagaactaaagtcattggcaaaggacactgcgatttatggtgccagcagtattattggtaagtttctgaactattttctggtaccgatttatactttttcacttcctgctgcttccggaggatatggagtgatcaccaagatgtatgctattgtggcgttattgctcgtagtgctaaccttcggaatggaaaccggctttttccgttttgccaataaaggagatgacgacccgaagaaggtatattctgtttcgttattgatggtagggggcgtatcgctcctgtttttgctgttgtgtctggtcttcctcaatcctattgcagggctgatggggtatagtgaacatccatggtatctgggcatgatgctgattgtactggctatggatgccattcaggctattccgtttgcttatcttcgttataagaaacgtcctatcaagtttgccggactgaaactcttatttatatttgtcagtatcttgctgaatatcctttattttgttgtcatgaaaggcgatgacgtaggggtagcctttcttattaatctgatctgttcttttgttgtaatgctcgggctgatacctgaattccgtgaatttcgctattgtcctgaccgtttgctgatgaagcggatgttatattattcattccctattctgatattaggagtggcaggcattgtgaatcaggttggagacaagattatttttccttttgtctaccccgataaggtggaagcggatgtacagttgggtatttacagtgcagctactaaaatagccatgataatggcaatgatcacgcaggctttccgcttcgcatacgagccttttgtctttggcaaaagtaaggataaggataataaacgaatctatgcgcaggcaatgaagttctttatcatctttacgctgctggcattcctggcagtcatgttttatctggacattttacgttatatcatagcagaagactattgggagggactcaaggtagttcccatcgtgatgattgcagagatgtttatggggatttattttaatctctcattttggtataaactgacggatgataccagatggggggcatatttctccattatagcctgtctgactgttgttctgatgaatatcttcctggttcctgtatatgggtatgtagcttgcgcatgggcgggttttaccggatatgccatagctatgttgctttcttattttgtcggtcagaagaaatatcctattgcttatgatttgcgtggaataggttgttatgtaggcttagctattattctgtatctgattggtgaatggacgccgattcataatacagtcttgcttcttgcattccgcacagtccttctgctactatttattgcttatattatcaaacgggacctgcctctgagtcagattcctgttattaaccggattataaaaaagaaatgactatgaagacagatgaacggaataagtttgcgatcaagtcgttcctaggtgaatacctggacttgaaaaaggataaagacaatgaaatggaaaccgttgactctatccgaaaaggagtagaattcaaaggagccaatttgtggattcttatttttgccatctttatggcatcactgggcttgaatgtcaactctacggcagtgattatcggtgccatgttgatttcaccgttgatggggcctatcatgggtgtcggactttctgtcggcttgaatgatttcgagctgatgaaacgttctttgaagagcttcctcatcacgactgctttcagtgtgacgacggcaaccatcttctttcttttcactcctattgccgaagcacaatcggagctgttggcgcgtacttcgcctacgatttatgacgtattcatcgcacttttcggtggtttggcgggagttgtagccctgtctaccaaagagaagggaaatgtgattccgggagttgccattgctacggcgttgatgcctccgctttgtacggcaggttacggtctggcatcgggcaatctggtctattttctgggtgctttttatctttactttatcaactctgtatttatcagtctggctaccttcatcggtgtgcgggtgatgcacttccagcgtaaggaatttgtggataaggcacgcgagaagatggtgcgtaaatacatcattctgattgttgtgctgacaatgtgtccggctgtttatctgacgtttggcatcattaaaagtactttttatgagacggcagccaatcggtttatcaatgagcagttgaactttgagaatacgcaggtacttgataagaagatcagttatgagcataaagacatccgcgtggttctgatcggtcccgaagttccggatgcttcgatatccattgcccgtagcaaactgaaagaatacaagctggaagaaacaaagctgactgtactgcaagggatgaataatgaagcggtagatgtctcttccattcgtgccatggtaatggaggacttttataaaaacagcgaacaacgcctgcaggaacagcagaaaaagattacccgactggaagaaaacctcgctcaatataaagagtacgatacgatgggacgtactttagtgcccgaattgaaggtgctttatccttctatcacttcgctttctatcgctcactcgctggaaacacgggtagactcgatgaaaacggatacagtgacactggctgttttgaaatttggcaaacatccgtcagttgccgagaaggagaaaatcagcgcatggctgaaagcacgggtgggagcgaagaagttgaggctcattaccgaataatgaccctcggattgatcatagaatatataaatctaaaaataatagcatgaaactcagactaaccgcaatgattctcctctccctttgcctgtcacaggcatttgctgacgagggaatgtggctattggggaaccttcgcaagaacaaacaggcggaacgggtgatgaaggaactcggtttgcagatgcctgtaaataaactgtataatccgaagaaaccggctttggcaaatgccgttgtcagtttcggtggattctgttcgggagtggtggtttccgaagatggtctggtatttaccaatcatcactgtggtttcagcagtatccagcagcattcttccgtagaacatgattatctgaaggatggttttgtagcccgcaaccttggtgaagaactgccgaatcccgaattatatgtccgtttccttcttcgtacggaggatgtgaccaagcgtgtgctctcggctgccaaacatgctcatacggaaagtgaacgtcgcgtagttgtcgactctgtcatgaatgtaatcggcatggaggtatcagagaaggactctacgctgacgggaattgtcgatgcgtattacgccggaaacgagttctggctttctgtctaccgtgattttaatgatgtccggttggtttttgctcctccttcttcagtcggcaagttcgggtgggacacggacaactggatgtggcctcgccatacaggtgacttcagcgttttccgtatttatgccaacaaacagaacggaccggcggattattcacctgagaacgtcccttatcatccggaatacgtagctcctatttcattggatggatataaagaaggctctttctgtatgactcttggctatccgggcagtacggagcgctatctctcttcgtatgggatcgaagaaatgatgaacggcattaatcaggccatgatcgatgtgcgcggggtaaaacaggctatttggaagcgggaaatggatcgccatccggatatccgtatcaagtatgcttctaaatacgatgaaagttccaactactggaaaaacagcataggaatgaataaagccatccggcacctgaaagtgctggaaaagaagcgcgcagcagaagcagccctccgggactggattcagtctcatccggaagaaagggagaaactgattcgtctgttctcttctctggaactgaattataataatcgtagggaaacaaaccgtacccttgcttatttcggggagtcgttcattaatggtcccgaattggttcagctggcactcgaaattctgaacttcgattttgaggccgaagagaagttggttgttacccgcatgaagaagttgctggagaaatacgataacctgaatctgtctattgataaggaagtatttgcggccatgctcaaagaataccggtccaaagtggataagaaataccttccggcgatgtatttgcaaatagacaccttgtataacggaaatgtccagacttatgtagactctttgtatgctacctctcaaattacttccccgaagggactgaagcgcttccttgaacgtgatacgacttataatctcatcgaagaccctgccatttctttaagcctcgacctgatagtgaaatactatgagatgaatcagagcgtctcagaggcttccgaacagatagagcaggatgaacgcctgttcaatgccgctatgcgtcgtatgtatgccgaccgtaacttctatcctgatgccaattccaccatgcgccttagttttggtacagtctgtggatattctccttttgacggggctaccttcagttattatacgacagtaaaaggaattttcgagaaagtaaaggaacacgcaggcgatattgactttgctgttcaaccggatcttttggctttactctcttccggtgatttcggcagatatgccgatgaaaagggagatatgaacgtttgttttatctcgaataatgatattacgggaggaaactccggcagtgccatgttcaatgcgaaaggggaattgcttggtcttgcttttgacggcaattgggaagcgatgagcagtgatatcgtatttgaaccggacttgcagcgttgtatcggagtagacgtccgctatatgcttttcattatggaaaagtatggaaaggctgccaatcttattgaagaactgaaattaacccgctgaaacggaaaacaatcttataagaaggctgctcttatcgtttcagtataattaccattacagcaacgataatcagtgcaatgcctacgccaatacttgtggtgaatgcttctccaaagaggaagatgcctacacatacggcagttaccggctccatagctcccaatacagaggtgagtgtggagccgatgctttttactgctctgaccagtgcaagattagaaacgacggtcgggatcaatgccagcaagattagatttccggcagtatgccattctctgataggctgaagatggctgatactgctggttccgataaagagaaagattcctccgaaaagaaagacatagaaagtgagcagtaatcctttcatccggccgatctttaactggctcattgtgacaaggtacagtgcatatcccaatgctgataaaagaacgatgaaaaggccgaaaaatgagaaacttcctgtctctgtatttccaccggataagaagtagacacctatcacggcagaggcgatggcggctatccgccaaccggactttttttctttgaagaatagcatcatgaccagggtagtcagtaccggatacatgaagtgaatggtggtggctacaccgcttgccataaacttatatccccagaacaggaagacggcagacatcagataaagtatcgcaagcaggagcagggaaggaatgtcccgtctgctgattcgaaaggattgcccgttgatcagtagaatcccgcctaatgccatacacgcaaacaggaagcgatagaagagtatcgattcgaattgcatgcccgcctgcatggcaggaatggtgaatagggggataagcccaaaagaggccgacgaaagtagaccgtacaggaaaccgttgactttattcatatttaagtatatattcggagtgcaaagatactcataatagataagatgatattatgtttgaattataaaatagagattacgtccgaaacgtatgaagctgtctctgttttcttgttgagtatatcgaatttttcgctaaaacatgtgtttagggttgaaataaacagatattgctaaattatgaacagatattttctctggtagtgtttcttttttctgacctttggtgtgtccagagtacaaacctgtaaatatttgaattgacaacaaaactatgatacatatgaaaaacagattagttggcttattagtgttcgcgttggttgcttttaacttatatgcgcagtctgatcaaagtaaaaagggacttcttacttttaccggtacgcgtattatttcctttgatccaatgcgggaaatgcctaagatggcttggtatagtgaaaatcaagatattcgggtagatgaagaagtgctctttaataatcaattgtcattgttgattccgtctgtacggggaaagaaaacagaagcttatttcggcatgaataaccgcgatattacaggtaaaacgattgtgtttaaaggcaaatacaaatatcagcaggcaaataatgccaaagtgagtttcgcaattaaactggacactcaccttcaaagaatagacgagaaggctattgatttggaatgtaacggcagtcaggactggaaagacttttatgtggaaatgccgtttacacgttccaagaaatttttctttcgaatactctgtgacggggaggccaggctttgggtgaacgactgccaagtgctgatagatggacagtcacttgatttaatcaagaatccggatgttgaagtagacaaggatctggagtttgctggaaattcaggaatatcgcttggagacgttgacgggcaaacattggaaaatttggtggttttgggcaaggtttggggattccttaaatattttcatccgcaggttgtggttggaaagtataactgggattttgaattgttcagagtgatgcccgggatagcagctgcgaagagcaaaaaggaaaggaactcactgttaaacgaatggatagataagtacggtaaaatcacggaaaccgaggagtatgtaatcggagattcggcccaatatcatcgttttgcacagcttggctggctggaagatccgaatgtcttcgataagaaactgtctgaaaaactagtgagaatcaagaatgccaaacgtaatagtgtattgaactactatcttccgatattaaccggaaaggaggaggtggaatttgccagagacaaaccttatccttcaatcgattgggaagatcagggatatcgtattcttacggtttatagattgtggaatgccatcgaacatggatatccttacgccaaccttacagaccatagatggagtactctgctggcgcaatatctgcctgaatttatttatgcctcttcggaaaaagatttggaccattctatacgaaaactggctgctgaaatcaatgattcacatggagggcttgaatttccgaatcatgctccccgattgtatggtcttccattgggattgactcagacaacggacggtaagcttgtagtagaatcaactgcattaaagcagattgagcgtggatcggtcatactggctgtaaatgataaaccgatttcggaaataatcgacaattaccgttctatattgccttcttcaaatgagcatggtttactgaggaatgtcgcattcagactatttgttacatcggagaatgaaatgaaagtcacagtggagaatcaagggcagtcctatgaatatgcgatacccatgcagtcttttgaaagagcatcttttaaaggtcggaagagtccgtcagattacggactggatgccagaaagattctttatgtagatgcaggtataatggggcttccggaactggatcagatgatgaaaacaaatttgaatgccaaaggaatgatattggatatgcgtaagtatccgagatgggacattatggaagtacttggaaaatacctttatcctcaaccaactacatttatgtggtattccattaattcgaagaaatttccgggtaactttggtcttgatataattggaaaaattggttttaaagaaaatcctgattatttcaaaggtaagattgctattcttgtaaatgagatgactcagagttttggagagctaatgtctgtcgcttatagagtggcaccaaaaagtgcggttatcggtacgcaaactgccggtgcgaacggtcatgtcggatatttatatttgcctcggggaattaaattcacctatacaatggcgggagcattctatcctgaatggaaattaaatcaacgggatggagtgactattgatattccggtggaacagactgtagaagatatagctgcaggagaagatatgtggattagaaaagcgattgaatatattgagagtaaacggtaaggttgcaccctgattaaagggatattcagcccgtcgatataattcgatttgaatatattgacgggctgaattatactattagcaagctgaacttatttctttatcggtctgcttggaatcttttcaaagatagatctaatccgttccatatcaaatttaggctgccggtcgtaagtgtagataccgtttttctcttgttcgatatctgaaaactgtgtatagcagaatccgctgatgattccggaggattgaatcgcattgatgagtttttcgatgcgttcgaagagggcatcttcgttggtaaatgttccttcatgtccccatgtgtcttccttggttctggatgtctcccatacaataccgccgaattcaccgatgataaaaggttggttggcataagctgcctggttcttgtccggctttaagcttagtgcgaaacgtgttgcatccggttcgtaagtactgatgctccagatatctgtcaggaaatggaatccactgccggtaaggtcgttgaacgggcgactgggatcgattgcttttgtcagtttttgcaggtcaaataccaagcgtgcaaatgtaccggatgtaacattgctcaatggtacggtaagaggtgcccatgtgatgatagaagggtgattacggtctcgttcgagtatctctatccattcactgagaagatttcttgatgcgatctcgtcatcgggattcattccccagttaggagactctccccaagtgataaatcccagcttatctgcccagtaatggaatcgttcttcaaaaaacttttgatgaagccgtgccccgttgaagccggctttcttacttagtaaaatatcatttttaagggcttcatcggtaggtgcagtccagattccatcaggataatacccctgattcataaccagacgctggaaataaggctcgttattcaagtaaaatttgccattggctatatgcactttgcgcatacctacatatgattttacctcatcgatgatctgccctttggcatctttgacgcagtaactgatatcgtaaaggtggggagtttcggggctccagagcttgatattctttatcggtaagatcaggttactgccattggcacattttgatgtcatttgagcgatttttttctcgctgtcatagatcgtaacttccagtgtctggtcattggatatctgatagaattccggagtaatgatcaattgattattgttgatatctggataggtatttgccgatttcagtccacagggagagagcgcttccatccacaccgtttgccagatacctgtgacacgggtataaaaacaggcaaaggagttcttctccggagactgtttgccgcatgcctgacggcccgattttgcatcatcggacacggatactaccagattgtgactattcccgggtttggctatgcgactgatatctattacaaaaggagagctcccgccgttatgaaaaccgacaaggcgtccgtctatataaatctctgctaaatagtcgacagcgccgaaatggagtaaaatcttcttgttgctccagtcagcaggtatcggcagagaacgttgataccacattttttttataaagtccgtgtgattaactccggatagtttgctttccgggcagaaaggaaccgtaattgttttgctaagctcctttgccgtaggtaagttacgctttttcccggaatcatcaagatcgaattcatatgtccatgtaccatttaaattaacccaggtagttctttcaaattgtgggcggggatattccggccggggaatatcattggttgcgtttgctgcaaaagagagtagtaaaccaactagcatcagatgtgcttttctcatgttttgtaatttttgttattgtataatttaagtgccttagctgattgtaaaaatagagatttaaaagaagaaaaggtgtaaacgattgttcaaattaggaaataatctgatcatagtgaagattattcggttatatttgataaatgtgtataataatgtcacaaatttatggtatgaaataggtaaaagccgctacatttgtaatcgaatgaattttaggaaaatattatagaagaacatttaaactaaataactcaatcaattattatgaaactacgaatcatgcgaagtgcatggattgcacttttgtttatgtctttatctgtaacagcacaaaccacggataagccggagtggagcaatgagcaggtctcgggagtcaataaggaagaagcagttcagattgctattccttttaccgatgaacaacaagcaatgaatctgactattgaagagtcaccttattacaaaacgctgaatggaatatggaaatttcattgggtggctgacccgaaagaccgaccgcaggatttctgtaaaccggaatatgatgtaagccaatgggataatattaaagtccctgcaacctggcagatagaggccgtaagacataataaaaactgggataagcccttatattgcaatgtgatttatcctttttgtgagtgggattggaaaaagattcagtggcctaatgtaattcaacctcgtccgtctaactatacttttgcgacgatgcctaatcctgtcggtagttatcgcagggagtttatattgcctgattcatggaaaggacgtgacatctttattcgttttaatggggtagaagccggtttttatatttgggtgaatggtaaaaaggtcggctattcggaggacagctacctgcctgccgaatttaatctgactccttatctgaaagctggaaagaatgttcttgctgtcgaggtgtatcgctttacagatggtagctttctggagtgtcaggatttctggcgtttcagcggtatattcagagatgtatttctgtggtcggctcctaaaacgcaaatcagagacttcttcttccgtacggatttagacaaggagtataaaaatgcatccgtctctctggatatagatattacaggtaaaagaagtaataacgagattcaagtgaaggtgacggatcagaatggtaaagagattgctacccaaaatgcgcgtgctgtaacgggaacgaataaacttcagtttgaggttgtgaatcctttgaaatggacggcagaaacgcccaacctttataatctcactattcttttgaagcaaaaagggaaaactgtagatattcgtagtgtcaaggtcggttttcgtaagattgaactagcgcaagatggtcggctgttgattaatggaaaatcaactttgtttaagggagttgacagacacgaccatagttcggagaatggtcgtacggtatctaaagaagaaatggaaaaagatgtgcagttgatgaagtcattgaatattaatgctgtacgtacttctcattatcctaataatccttatttctatgatttatgtgacagatatggtatatatgttctttccgaagccaatgtagaatgccatggtcttatggcattgtcctctgaaccttcatgggtgaaagcatttacggaacgcagtgagaatatggtgcgacgctataaaaatcatgcttctatagtcatgtggtcgttgggcaacgaatccggtaatggcattaactttaaatctgctgcagaggctgttaagaagctcgatgatacccgtcctactcactatgaaggtaatagctcttattgcgatgtaaccagttctatgtaccccgatgtgcaatggctggaaagcgtagggaaggagcgtttacagaaattccagaatggagaaacggtcaaacctcatgtggtttgtgaatatgctcatgcgatgggtaattcaatcgggaatttcaaagaatattgggaaacttatgagcgctatcctgcacttgtcggtggctttatctgggactgggtagatcaaagtattaagatgcctgctccggatggttccggttattatatggccttcggaggagattttggagatacaccgaatgacggtaatttttgcacgaatggcgtaatcttttccgatcgtacatactctgccaaggcatacgaggtgaaaaaaatacatcagcctgtatgggttgaggctatgggaaatgggacgtataaactgactaataagagatttcatgcagggttggatgacttatatggaaggtatgagattgaagaggatggaaaagttgtattctcggctaatctggaagaattgtccttgaacgcacaggacagtaaggtcattactatagctgataatcagatcaataaaattccgggagccgaatactttataaagttccgcttctgtcaaaagcaagatactgaatgggaaaaggctggatatgaggtagcatcagagcaattcaaactttctgatagtgcgaagcctgtatttaaagcaggagaaggtagtattgatctgatagagactgatgatgcatatctggtaaaaggctcgcagtttgaagcgtctttttcaaagcagcagggaacgatctcttcttatacattaaatgaattgcccatgattagtaaagagttggaattgaatgctttccgtgctcctactgataatgataagcaagtggatggtgactggtatcagaaaggcttgtatcagatgactcttgaacctggacattggaatgtgcggaaagaagataataaggtaactctgcagatagagaatctatatcggggaaaaacgggttttgattatcgaactaatatagaatatacggtggctgccgatggttctattttggttaatagcactattattccttcaacaaaaggtgtaattattccccgtattggttatcgtatggaacttccggaaggctttgaacgcatgcgttggtatggtcgcggaccgttggaaaactatgttgaccgaaaagatgccacttacgtaggcgtgtatgatgagttagtatctgatcaatgggtgaactatgtcagagcacaggaaatgggtaatcgcgaggatctgcgttggatttcaataaccaatcctgatggaataggctttgtctttattgctggtgataagatgtccgcttctgctttgcatgcaacagcacaggatatggttgactctgccaatcatcgcaggttgcttcataagtatgaagtaccgatgcgtaaagaaactgttctttgtctggatgctaatcagcgtccgcttggtaatgccagttgtggtcctggcccgatgcaaaagtatgaacttcgttcccagcctactgttttcagttttatcatactacctttggagagaagttattcgacagaagaacttataaagaaggcacgcgtacagatgcccgtatgtatgcctgtattgatagaaagagataacaatggttatttgaatttaaagactaatactcccggagctactgttcattatagtctgaatggcggagaagagaagatatatactgaacctttcgaatttatttctggtggtcatgtggaagcatatgccgtttcagaacaattaggaaaaagtgcgggaacttcagctgaatttccgatatatgtggatcgttcactgtggaaaattgtatcagttagtagtgagaatgggggtgaagaggcccgtaacgcaatcgatggtgatctgaatactatctggcatagtcggtggaatgatcctgtggctaaacatccccacgaaatagtagtggatatgtcttcatcacttgagattgataagtttatttatcaacctcgtaactctgagaacggacgtatcaaggactatgagctctatttcagtaaagatggaaagaactgggaaaacaagactaaaggtcgttttgaaaattcatcttctgcacagtttgtaacattggagaaaccaattgtggcacgttactttaaattgattgctttatctgaaatttatggtcgggattgggcttcggcagcagaattaaatgtcaatgcagtccgtaatttatcgggtgcatctgaagagagacagaaggttgtatatgtggatagtgatgctgatggaagtatgaaattggctgcggatggtgatattaatacattctggcatacggtacataaccagttctatctggctccttatcctcatgagatacagattgcattagctaaagaaactacagtaaaaggtcttaaatatacacctcgtcaggattcttcggaaggtagaatcggtaaatatgaggtgtatatcagccatgatggcaaggagtggggaaaagctgtggcttctggtacatttgccgattcaaaggaagtacagacagttgaatttaatccatgtaaagcacgttatgtaaaacttcaggctctgtctgctgtcattaaagaggctaagatggctgctgtggcagagttagaggttctcttggctgaataggaaaagcgataaagagtgttatgaaaaagagagactgcctcattttttgattggaggcagtctcttttttatgggagatatcttgatttctacagtataggcttattcgagaacagctgaaaacccaccatttctagccattttgacagaaagcttttgattcttattcattgttgccgatttcatacggtaatccattgcctgatatcctgcatttattccatcctcaaacgaggttacacggtaggtcctgccatctttcaggaagtcgagatttatttcaaattctctttcattttccttatcattagtcatcccaccaataaaccatttctctcctttacgcttcgcaacgattacatattcacctactttggcttccagaacaactgtttcatcccatgttacaggtacttgggtaatgaaacgagtgcaatcttcattgcggtaatataaggtcggattgtctgccaacatttgtaaaccgctttcgaatatgacaaataaagccatttggtatgcacgggtaccgatacttgcagagttaggacgttcggaacgatagatattcggttgcatactgatcatagctccaggagtgtaatccatagggcctaccgcatttctcatgaaaggcaagtagatgctattctccggcttacagcctcccatttgttccatacctctgaccccttcataggataatacattgggatacttgtattccagtccggccggcttgaatgatccatggaagtcaacaaataaatgatgtctggctgcttcttgggctactcgttcgtagtagttaaccatccattgatcgctgcggtccatgaagtctatttttactccctttattccccattcattgaatgttttgaaaaggtcaaaattcttttctactgttaaccaagtcagccaaaggacaatacccacattcttttcttttccataacgaatcagctcatgaaggtctacgtccggattaggagtgtaaggatcgcgtgtactcttggcccatccttcatccataataatgtaagggattccgaacttggatgcgaaatcaatgaagtatttgtatgtttccaaattacaaccagctttaaaggttacatcttgcccatacggggttgctccgttccaccattcccaacttacttgccctggttttatccatgacacatcttctaactgattcttatcagccagtttataggtcatagtgttctcaactaattgcttgtcttccttggtaatgacaaagtagcgccatggaaagttcctttttccacttgttttagcgatatattccgcttctttttcgattttgaggctgcggtctccgtcttcaccaaatgcaagggggacttttggaaaaatggaggatatgccattggtcccgtttcctttcagaaacatgcaaggatagtccgacagatcagattcactgattagtatcttatatgatttacgtgtatcaatgagaactggaagtacggacattttatccgatggtttccatgagtgactggaaatgtgtgtgtacggctcttcataagctgttttgaaccctcccggctgttggagatgtaataaatagtctgtcgggaactgcaatgaaaggtcttctcccaatacttcgatttctcctttttggcgggtgataaaacgataggctattccatcgttaaaagcacggaattctactgagtagtttcctttaaaattgagtagaagttggttatattcgttattgatcgttgaaaatttcagtggaatgacaggggttaaggtttcttttattttgttctgtttttgtccggacagtttgggatgttcgcccaatattttatcttttagtttaagttggagataattgtctttcaacagaacttcatcattacaggctacgtcatagtagattttgtcggtgaggcggacggatacttgtatttctccgttcggggaacttaactttattttttcttgtgcttgtacattggatactaaataataaacaagcaagggtaaaagaaaatactttttcatttttcttaaatagttatgttgtcgtttaatgtattgattactaatattgagcaaatataaacaatttgaaatagataatagtatactaaataaaatagttttctgcttgggtaatatgagggtatgcttttattttatcaaagagcaaatacaggaagtgaagtattgacttgaatgtttagttgtgaaaataaataagctgttcatcaatgactttgcagaagttgatgaacagcctatttatttttctaagaattagtaagattattatttatcggacatagatggaggtaattctcctgttcttgaccattttgacggtttcgatcccattacaaattctagtgtacctccttcacatatgtctttatgacagaaccagtttttgttaagtggtttgccattcaaggtcgctgattgaatgtagatatttttgtcgttattcttttttgttataaccttcagggttttaccattttcaagatgtatagtaactgaattaaatacagggcttgaaataagatatgtgtcctggcctgcattaggataaaatcctatagaatgaaaagcataccaggcagacatagaaccggaatcatcgttacccggtattccgtcacgtgtcgttttatatctattttttaaaatataccgtacaatctcggctgttttgtcttgcctgtttacataattgtataatgacggaattaagaatcctggttcattggctatttggaataatcctatgtgataacgttggtcccatatcttgtgggtaaaaaaggtatctagtctttgagtgaaaatctcttctccgccgcacttttggattaaacttttcatatcatggggtacatagaatgacaactcaaaagagaaagtctcataagtaggttctccccaatttccgctttttaaggtactgaaatgctctttatcccagtactttccctcttcgtttcttggccatgcaaagcccgaaaatcccaaacttgttatactatcattccatgtgttttgccagttagatgcatttttatagtatttattggcaatatcttgtttccctaaacgatcggctaccgtagcgatagcaaaatcacaattagagtattcaaaagtacgtgtcaagcatctttcataagctgaagaaacataacctaatgagttatagtctgctaaacctccacggccttcttttctttcatctcctccgggagctacttttgcatttttcaacatagcttgtaagcctgctccataatcaatcccttgcagattctttaccattgcatcggcaatcagaatatcacaattacttcctccttgaacacgaccattatcattaccactacgtgcatcaggcatgtacccttcattgtggtatatgtcaataagtgaacgtaccatatttgattgaacggaaggggtaagcaatgtaaataatggatgggtagcacggaaggtatcccaaatggcatagaaatcatcaaagttcggttctgttgatatccatttcggattttctccggtcttgtctactggctggagatagcaatgatacaaagctgtgtatagtttaattttgtcttcttcttttcctgtgacttctattttatttaagatattattccattcggacacagcctgagtatgtactttgttgaagtcccaagttgttatctgctttaggttttctttagctttgccacaactgatataggagataccgacacgtacgttgattttttggttttcagaggtcgaatagctcaaataagcacctgttttttcgcctgaatcgaattgttcgttaatattcggcattaaagtatttcctttccatgtgccgaagctttctgccggtgtatctgtttctgcatagaaatagactgtataggcctctccttcattccagcctccgcgtacacgggtgtatccttctattgttgagttggaaagtatgcgtacttccgaacctacaattctttgagtttcgcatatttgtaaggctagacaactgcctagatcaaaaagaattttggagtctttgcttgaggggaaagtatattcatgaaaaccggctttgctcaatgctgtcagccgggctgctgtgcgataacgcggcaactcaactttgtattctcctaaaatggtattctcgttagcacggggggaagaatagtcttctaaatgtatatctccggtcagaggtaacattaatacgttgccatatttgcatcctccgcctgttccgcttacatgagtatggctgaagccgtgtatattgccgtcaggattccatccggcgttccaatctttattgccgcaatcgggacctaattttaccattccaaacggagtacatactcccggaaaaacattgccgcctccatctacgccgatgaaagggtctacatagcgtgcattgcctgtcacggtttgtgctccggcacttgttactgccatccatgtagcaatacaaattaatagttttgtttttaacatatctattcgcttttgattattttcaaattacaataagacggtctggtctttgccagactcccagatagccaaaagggcatataactcaacgagtgacgcttgcctcagaatctcccatttattcattgaaacagctccgcttaaatcctcgtcattgattagaccactaatgtgatgtgccttaccaaaccatgcgtgcaacattgtgttgcgcacatcttccagatatgagggattcttatcaatggaataaagttcgaagaatccgcggcacatgacggtgttaaaccaggcatgccccggtgccagaatattaaaatcacgttgcagaacttctgaatgataggaagtaaaccactttttgtggcaagcttccgcaatttgatgtgctgctgtcaaatacgactcattcttggttattttataaagaaggcaggctaattgcaatggttgtcctgaattataagaatatttattcgtctccatacgcccaggttgggtggggtcttctggatcaggagaaacattgtcgtaatacagatggtcgctagggtcctgcatataggcttgcagccagttgaagcattcaatagctttatccaggtatttctgctcatgggttagttgatagagcttacaactcaatacacccgtcggggcagttgaacaagtgtgctttgacttgctcggttcattcagctctttccaatgaactccgccaccgcaagtattgtcccatccgtattgtgatagatagtcccagacggctttggcttgatttaaatagcgcacatctttagatatggcataccattttgccatatccagtcctatccatacattgtcatcataaaaacggtcgtttcccgaatccggatatacactatatgctgtgcgtccatggtctgttacccaaaaatgttggattcccttgaacatatcatcttctaaagaacgataatattcttcctgttccgtgtctacggatgcttctctcaaggcaacaaatgcggataatcctcccccttgtccccatacgactgcatctccgtcccaatatccttgttctttaggataatatgtttgccaacatgtcctaggtcctttatgataatagtattttatgacacatgtcatcatagagtgggcgcagtcgaacatacttgtctttacatactcgaatgtgctcgcaagttggcttttgctttccgagcgtagctcattggctcctatcaaggtgattgcaacctcatatgtcccttctgtaggaacttgcaataagtaatttcctccatacttatagttgtcaccattcagcacaatagtagtccattctccgttttctccagactccgtattccgataagctatttctatctgtatgtctttcacataatttgttcttatgaatttcaccagaatttctttttcccggcttgttttgtatacttccagttgtcccaccggatcaatcttctggatatctttgtcttccacagaatcgtcactgcaagatagtactgtgcataccatggctaataaagatataaaaatgatgtttaatctcttcataaacaaattctttttaccattggattgcctggtcctgatccggtattgttatattaatcttacgttccatagttaatgaaccttccgctcgataagaagtaggtacatttgacgtagttatgtcatcatatgtatatttgatatataatacataataacgatgcatcaggtagggttgattggtatccatttcatcccaaatctcgtaggtcggatgctctgtgagctggaagtttattgaagaatttgccgccgttattgtcagattccctttctttttagtctccgtaacctctgaaggttcttcaaattttacattgattttataagtttccctatctattgcattatcttctttcgtacctgcatagaagaatacagtgttttcgtctacgacatgtgctctacgattgtctactaccaatggatcattgctcgaattggcaaaatagatgttcatggcagttgccgagtaatttcctgaataatcattgaatggtaatacatgaagcagggcttttcgccatcctttccgtttgttggtaatgtacgaggggtcctcctcaattgtcaatggcaacacccactctttcgaaaggttcatttctgaaaacttaaacttgatagggaatagttcctttcttgaacctgccggaatatggcaggtggcggaaggaaattcgtaattctcctgtggtagtaagttataccataagtcttttctgagttcgtgaaggttggcttcgttcatggcgttcaacgtatccgggtctacggcaatccgtacatcgagatccttatccaatggagtagaaccactgactagcaccggaaggttgtagataacctcaccattaggcttgtagcggacgtagatacttgaaacctctccatcattaattggagcttttagtgaaaccatgtgaacataaagttcgtctttccattcgtcattgcatgcactgaacgaaagcaatgcgataaacaatgtggctatataaatatgtctttttttcattcttattgtatattttagattaatcaaaagtttcccatcccggcgcctgtgtcattttgcggtttctttttaattcattttgtggcataggccaaaagtacatcttacgtgagaagtttgcttgtagattttctactcgtatacgttcataaaagcgttcttttttgctttcagtcatcagtacgttatagccatagatttgttcggactcttctaccggagcaagcttccagcgacgcaggtcgtagtaacgttgattctcgcccatgaattctacctgacgttcatgtattagtttcttacggaacaatgtttggtcattatatgtctcctcgttgtaatcaggaactccagcacgcatcctgacaggcaagacagctttgcggatttcttctgtatttcgcgaaactgtaattggttctccttcccaagttgttacttcgtagctactactcggagtcaattcgtttagggcttccgcatacatcagcaggatgtcggtatagcgaagtggtatgtctactttatcatagattcttccgttgttcgtgttgcagtcgttagggctgacaaatttcatgacacctattcctgtaggaatccagtagtcggaactgttttttcttccgttatcgctacctctgtagtaccatacttgttggttgcgtctatctccatcttgcgcacttgccaatgcccaaaaagcaccgttgaatgctacgctggcatagaaacgcggttcgcggttcgcatattctttccatactctcggacgtatctgcgggtaaagtccgcggttgtattcatcttccgagacgaaacgtttgtctacttcgcaagtgtctaggaatgtttctagattgaagctacttccgtctgccatatcataggcatcacactgtttgattgtcagtccgtggcggtttcttcctccggcatttgtgggtaaatgatcgagaacaagatctctgacttgatcatttaatgcattgtttcctcgtgtaaatatcaattccggattttcggtagcatacaagtctccattgaaaatagagcgataagaggcgaacgggtcaatgtcagcccatccttccgggaaatctttgttggagtatacagagtgatagggaggtcttacggttgccggataagcgttatctcctttagattgatagggagcggtgtatagcttgtatacaccggttgcgttggctaggtcaatgacatctttagccgctgccgctgctctagcccacttgctttcgtcatacgtctgagacattagcatgcgtccttgccaatcagtaaaatcagagaacttatcggagtcaccgggacgtgggttatttatcggacttgctgtatatagaagtacctttgcgcgtaccgccaaggcagctcctttcgtactgcgattgacattctgtctgtctcgtttctcaggcagtgatcgggccgccagtgccatttcctcactgatgtagttcactacttcatcgtagctactgcgtggataggacatgtccatataatcttcatcaatactgattgtctcttcaggaattagaggaactggtccgtattttcttagtaataaccaataaaaatagcttcttaaaaagcgggcctgtgctttatagtctgcaatttctacttctgacagttcttcattaatatctatattgttgattaagatagaagcctggcgaataccttcgtagcaacggatgtatgaattgtttgtccaggtattgtcatattgtccgaatttgaaagcattgtaagttacggctccgtcactttcattaaaaatcatatcgtctgcaaaattagttgtggaatagccgatacgtgtgatttctaaatttgtttctaacagacagttgtagcatttggccagccattgttccgtaaaattcttgctcttgaaaattttctcttcactttgacgatctttaaaaaaacgttccacgctcaaatagtctgaacaagaagaaatacccagcccaatgactaaaatggctactgcggataatatatgttttttcatctgtttttgaattaaatgttaattgtaagtcctaaggtatatgatcttgataatggataagcctgaccgttggtgctgcccagttccggatcccataacttaaaattggagaatgttatcaagttagttcccatgaagtataaacgaacgttgttcaagtgaatcttattgataagactcttcggaatattatatccgatttctaggtttttcaagcgtagataagaaccattgcgaagccaatatgtagacggacggtagttgttactattgcctccatagcttaaacgcgggtattctgcgttcgggttttcattttcacctaatatccagcggttggagttcgccatgtcggtgagaatatttccccaatcaccattcttgaaaggatatacagtaggaccttcgatacagaaagttgatttgcctgcaccttggaagaggatgttgatgtcaaatcctttccattctgcggaaagaccgaaaccataaataagatttgggcgattggttgcaccgataggaacttcgtcattttcatctatctttccgtctccgttgacatccgcatacttgatatcacctggcattacgtcgccccagctctgtttcggactgtcacgaatgtcatcataatctttgaataatcctagtgaaataagtccgcgggtttggttaacacggaaaccttgttggcttttataagggtaattactgaattcttcgtcatatttcaggatttcactcttactgtatgtaaagttacctcgcagtgtcagattcacatctccaatacgttgtttatatcccacattaccgtcgaatcctttggaaactaccgagccaatattggtagataacttcatgcctgttcctgtaccgtacataccaacggagagagggatatagttacgctcttggtaaataccgtcacgttgttcgtgaaagtagtcaattgtaccggtcagcttgtcattgaacaatgcgaagtcgatacctatgtcatgcttggttgctatttcccaagtgacagcattagttgcatagtaagtataggtcaatccgtcgaactgatagctttgtcctaggtctgcatagttgtaattgttgcttgctccgaaagtagacaagtagggaaagcgtctatccatattgtcattacctacttttccgtaagaataacgtactttaaacatattgatccacggtgatttttctttaatgaaagactcttctgccatgttccaggctacagagtaagcggggaagaaaccgaactgatgacctgttgcaaagttctcggatccattgtaaccaaagttaaagtcaacgaagtaacggtacttccaaccataggtgaaacgtccggaaagtccttgatgacgtctgtcaataccttgcataatgtcatcttccttttttacagaggcattgattgtcttatcttgtgtatatttcattacggctcccaccatgtgattaccaaaggtacggtcgtagtgcaactctgcttctaaatattcttttcgttcaccggttgagttagcttcttgtgacatcaattgttcatctctgacttttctcatcacaagactaccatcagaagcgcggttctgttccgctctccataattctggtatttttttacggttgatccactgataattgttagtgtcgaatccatagcgtccgatgaattttagacctttggtgataaaactgaaatcttgttcgagagtgatattggtctgcaatttattattccatgtttcttgatagccggtttgtgtagcaatggtccaaggattgatttgttcatcgtccgaaccgaaagcgggcgtatatccattggaatacatgattggtactgagaccgggttataattcatagcagaagcccagatattgcttgacatacccggttcgttctttttgtctaatgaaccggatacaccgacttttagcagtgtggttttggtgatatccatatccacgttcagacggtagttccaacggcgatagttggcgttggtattatagtcttttagccctttgtctactttatacataccaccttcatctacatagcttgcagatacataatagcgtgccaatgaaccaccgccgttcatgttgatagtggcacgataagtaggtgctccttttttcaggagtacatccatccagtctacattgggatataagtcctggtccagtccgttacggagtatatacaatttgtcttcagggaagaaaggttcttggttacgagtagtacgtgcttcattcatcattgaagcatatgtatatccgtcaatgaggtctggggttatggtacgtgtgttgtaggttgtttctacttttgcatcgatttgtacttttcctcctttaccacgtttagttgttattaatactacaccattggcgccacgcgaaccgtagattgctgtggcagaagcatctttgagtacagtgaaggattctatatcctcaatattgagttcattcatactgcgttcaaatccgtcgactaaaatcaaggcacttgaacctgctccgaatgtcgagataccgcgaatccagaattcggaaatattatttccgggctgtccggaagtttggcgagccattacacctgctatgttacctgccaaagcattagtaatgcttgatgtggaagtcttcagtgtatttatatccacattggtaacggcaccggtcatcgttattttcttctgtgcaccagtacctgttaccactacttcatccaaagcagtggcagtggcttctttcattatgaccttgattgttctttgttcttttatcaggacttcctgtttttcgaaaccgatgaaagagaaaacgagtctgtggtagggttccatcttgattttgaacttaccgtctatgtcggtgatggcacctaatcccgggatgtctttgatgattacgttgacaccaattaatggttctttggactcgtctgtcacgagaccttcaacctctattctgtttgtttgtacctctaccgaactgttttgagcatacacgctgcatgtgcaacagaacaggaggagcaagttaaaaatatatttttcattcggaatgtgtttttatagttattctatagaaatggtacggatgctgtgattttctctatcggcgatgtagaaagtctgtgtttcttcatcgtaagcgatgccgcatggattatcaaagcgtgcttccgtttttaattctccgtcaatattgccagataccttgttgtcagaagagacactgcctcttcctgcaaaaagagatacgttaccgtcgggagtaattttaaagatgcaatggtttcctctgtcgcatatataataatcataaatgtttccgtccggacgaggattttttatgtattcttcattcttcacaaatgtgccttggtaaggttcctgaaaacgggcactcggaccgggcgagggactgtacccggcttctccttctctaccggcaaatgtggttggcttctgaaattcattggttactttattatattgggataccaaaatacagttacggcctgtgatatacataaatcttccatccggatggatacacataaaagtaccggaatcactattttcgtatacaccaaataattctactccttttttgccaccggtcgtaggatcgtgaacagctttttgaagtcctcctttccaataggtgttgtagtaaagtgatttatttagggcgcagtaaacattgttatatcctgtgcggtcataaacataggggtgggcttttctgaattcttcagatcgcagaatgtaagcaatttcacggttgtctttactgctgcttccatggtcatctgatacgaaaagagtgtctccggttgcatcgaaagacatgaattgcatattcctaaatcctccctggccattagtaagaagagttgagacttcttttgcttccagattgattcgacgtataggaccgccttgaccattaataattaagcatttctcaataccaaatgtgtccattaatagccattgaggatttccgaatcttgctttttcaaagtttccgtctacgtcagatgaatttccattttcgtcttcgctaccaacaagagtactcactgaaggctgtagagtataattgaacttcttttcaaattcatattctataggagaggtttttccgtcggcactttcgatttttattttaatattaccatcgaaagctttcggcgggactatacagtaaatttcggtgttggtgcagccgatagttgtcgtgtattgtccacctattgtgatgtggatttttgagggatcagtcccaaaattatctccataaatatggatttgagtacgaagactcccatgatcgggggtaaagtctgagaaaacaaccggtttagacgggtcgtatccattggaaccaattttgtcgtcctgacagccgataaggcatacggtcagaatcaacaccagtgccttataccaatagaggcatcttttttcatgtgtttttcttttcatatagtttttttaattaagagtaaaatattaatattttttattttagagctcatataatgaggagagcgttagtttataagttcacctcgataccttccacaagattgccactagcttggcaaacgccttggtctgtgagaactttgacaatagccatatctttgttttctgttttaaatttgcctttttcgctagtcaactttactataactttgtcgccttgtttttcggctttgaaggtttgttggctgtaatctcccttcttgaatgcccagccatctcctgcatcccagtacattgatccatcggcttttccttgttcatccagacaaaccaataatgtgagcggatctaatgagttttctgtggtattttgaatgatctttccggtaggaataatcgaaccgccacgtatcttcatctttgcttgatatttatcactgttgtcacctttaactagtgatagttctttccaaatgcctttcggcagtgcaggctgcttagcgtatgccggaataataagcaggttgttaccaatcaggaatgcttcttcttcggcacgcaacgacaagtctttagggtcggcgaaaaaaacaggtcgcatgatgggcataccatttgttgaggcttcgtgcagcagagtataataataggggagaaggatgtatcgacgttctaatgctattcgtgcggcattttctacttcttgcccaaatgcccatggctccttgttgtttgttcctgcacaagcgtgaccacgtgagaatggatagaaagcacctacaccaatccagttgccgaataaatcggcatcagcattaaatagaaagccaccgatatccgaaccgctgaatggttggccggataatcccaaagttaaagacatgggtattgacattttcagatggtcccaccaggagccattatcaccggtccaagtggctgcatagcgctgaccacctaagaaattagaacgagtaagaataaacggtcgcctttcggggcgggtttccagtatgccttctctggatgctttaaccattagaaaaccataaacattatgatattgtagatgtgttcctgcaggcaatttacctcctccgcggtggagattatcttccagcattgttttgttgggagtgtcattgatttgtggctcatttacatcgttccaaacaccgtctactccttgtgccatgaaatctttatataagttcctccaccatttatttactttagggcatgtgaagtctgggaacgctgccgctcctggccaggcatcaccatgaaagttctttccgtctgcagtttttacccaaacgtcattttcagttcctgatttataaacgaagtagttggggtcaacttttgctccaggatcaatcatccatgcagaatggaagccgcgtatatgtaaatcgcgattaacagccttaggattgggaaaactttgtgggttaaatgtgaaaatacgatatccatccatgtagtcaatgtccatccagataacatcgcatggtattcttttgtgtctgaaagtgtctgcaatctcaattacgcgactgtctggtgaataagagaagcgactttgttgatagcctaatgcccagcggggaatcatcggcatagtgcctgttagttccgatagtccgcgaactacagcttgtggagattctctgtcaataataaacacccgaaaaggttctccctcacttcttagttcaattttctcatttgtactacttaattcagctttccatgtggtatcgaataaaataccgaaagctgttccgtcttttctaactcccatcatccaaggatgtgattgatataggcgtgtaccattatctacaccgtaggcaccggaatctgtattccagagcttgattgttttaccatttcttagaagagaaccggttacttcaccacctccgtagatacttgtgccttccggtattgtaagtgatgcattagctttaccatctgtgagggagaattcgggaataagtatccaatcggcagggagtatgcctctctcacgtggttctttttcaattgcgaacgaaggtactttctttgcgtcaaaaccttctgggataaacttggcaatgccgtctccaaccaatacgctttgtttgatggatactttctgtgttgctgcgtctgccaatagaggcaaagcagtgagcaaatatattgctactgttttaataagggtatatttcatgttttaataattttagttgtcattctttctagaaaaattattggatagtggcaaggcgggcgtacatttctatcatggcagcttgtgttaacaaccattttttgtcatctttgcttttgccgcttaaatctgtattaaataatcctttatcatcccgggcgtacatccaagcatggtttaaacttttatcgaaagcgttgatatatgttttattcttatctatatgatagagttcgataaagcctcttaacattaccgcagtaaaccagatatctccttgctttagcattttaaagctttctcctgtagttgttgtaaagtctgtgaaaaaatagttatagcattctttagctatattttgtgcatctttcaggtaaagaggatttcttgtcagttgatagagcagggcggctgattgcatcatttgcccgctgttataggcgtatttggcttttcctatctttctgtcaagaccgatattgtcaaaatagaggtaatcagtggagtcttgtagattcttttgcgtccattcatataattcttttccttgtctgaagtagatgctgtcattagttgctttaaatagtttaagggcgagtacagagccaggagcatttgaacaagtatttttagactctttcttttgctcacaccagtaaatgcctcctcccaacaggctatcagtaccactttctataaatttccatattaattgtgctttatccagatatcttttctcttgtgttatttggtagatgtcggtgaagtcaatgcctaaccatacattgtcgtcataaaaacgatcggatgtcggtgctgtttgtatgtacgatgagtaagcgttaggagttctttggatatcgaaatattcttccagaccaggtaatacccgtttatctaataatttctggtatttcttgtcatgagtcgcttcgaatagtgcatttactgcagagaaagtacctgaatatggccataaataggagaactgattaggcgtgtttgcttggtcttccgatgccagataagtgactttgtgttgttcgtcaaagggatagctttcccgaagcagataagagtcctttgctgagtaatgttgataaagggaatccaatgtctgctgggcttttcccaaacttgaatctgagtctgcctgctttgttgaggcacaaccagtcaaagagagggtgcaaactatgattagtaaaatacacggtgatttcattctatataatattatattcattattaactaaagattttccttccaaaatacaggtagctgaatatgctacctgtttgtggattacctatttcaaactacaatcctttttattttgctttttaccttattccgttgtctgatgctgcaaagttattatggttagtataagatgatgtacggacccatgacataaatgtctcttctcgatgaaatgtcgcaaaaatatatatatgtgtcgtaaaagcgtactcctgttatgttaattttcagatgatcagaatgttttttgtgcagttcttggacgttttcccgattttccatatctttccgtcgatttttgtgtcttgatttaaaacaagagaatgctatatgaaaaaacacaatgaatggacgaagagaactactcttttaagaagagttctgctgatactggtttcttttcttttgataggagtagacataaatgcttcgtatagtctccggcaattttccagtaagaacggattatccaatagtgctattctttcgatgtgtcaggataggcatggcgtgatatggatcggttcatgcgatgggctgaatatctacgacggcacttatctgggattgtacaaaccaaccaatgtgcaccatagtttctccggtaatctcatcgaacggattatcgaggcggacaacgatgtgctttggatacagactaattatgggctcgaccgctttgatacacgcagacagaccatacaaagcttcaaagactttaaatacataaaccgtatggcgataagtcccgaagatgatttctttattattaaggatgatggctacatttattattatcagccggagcagaaggacttctgtaaacttgatgtgaaaaagatacattttgaggaagtacaacaaatggctattgataactttggagtactttggatattctcttcggataatgataaccggagttatataatagagaaaaacggaaatcaagtgaagctggttcccagtaattgcctgaatcattcggaaaagttgttgtggacgtttgtagatggcgattttctctatttcatagacagtacttatgcactttatgaatacgatctgaataatcataaagcgtattttatagcagatatggaggcagagatacttcgtcggggtgaggtttcttccattataaaacagaaaactgattattttatcggctttaagagtagtggattaatccaattaaagtatatgccggattcaaaggtaaaatatagcctccagtccataaatgttcagtccggtatcttttgccttatgaaagaccggtttcaggatataatctgggtgggcgctgacggtcaagggctttatatgtattttacagatgagttttctattgacaacatcatgttggatgtaccggagtatcgggtagataatccggttcgtgctctatatcaggatcaggatcagacattgtggataggtacgaagggagggggaatattaaagatgtttgatttccatcctgatatggaaactttgcctcgggcagaaaggatcctggcaagtaatagtccgttgatggacaactcggtgtatagttttgctcccagccggaggaaactcttatggattggaacggagagcggacttaattactactcctattcacaaaagcggatacaggaatttccggtcatggcagatggcaagatggtgaagtatgtacattctgtccgtgagacaaatgatagtacgttgtgggtggtttctgccggtgaaggtattgtgaaaatcattctggatgctacttcacttttacctaaagtgaagtctgcccgtcgctttacactggatggcggaaagagaaactccaattatttctttgtctcttttcaggagaatgattcggttatttggtttggtaaccgtggatatggtgcgtataaaatgaatacgcataccaatcaactaactccctgccgcattgacgatgtagtgaagaatcagactgtaaatgatatttttgctattcataagaatgacgaaggatactggtttggtacgagtttcggattgacccggctttatcagggcgaatatagggtatataacgagactgacggctttcccaacaatacgattcacggcatattggaaggaagggacaataacttgtggcttagcaccaatcaagggttggtgaggtttaatgtccgcgaaaacacagttcagacgtatcggcagcagggcgacctggaagtgattgagtttagtgacggtgctttcttcaaggatcagcagacggggacattattttttggtggtacgaacggattcattacgattagcgagaatgatcaactttcggaagaatacatgcctcctttgcatttcaatcgcctctctatttttggtaaagagtgcaatatttatgattttctgcaaggcgctacgaagcaagaaactttggtgctggactatagtcagaacttctttaacctttcatttattgctgtcgattacattaacgggaacaattatacttactcttataagatagacggtttgagcgatagttggattgagaacggattgtctacggtggcggttttctctaatctatctcctggagaatacaccttgctagtgaagtaccgaagtaatataacagggaaagagagtgaaccttattcattattgatccgtatcactcctccctggtatatgactacttgtgcttatattgtctatttcttattattagccggggtaattgcaggagctatccggatggtgataaaacgttatcgcagaaagcggaatgttatgatcgaggaaatgaaccgccagcagcgcgaagaactgtatgaatcgaaattgcgtttctttactaacattacccatgaattttgtactccgttgacattgatcaacggtccgtgtgaaaaaatcctttcctatagccgggtagacagttatgtccggaagtatgcttccatgattcagcagaatgcgttgaaactgaatgcgctgatattggaactgattgagttccgccgactggagacggggaacaagattttgaagataaaacatgttcctgtcacagaacagatacggactattgccgaatcattcggagagctggcggaaagccggaaactgaactatcgattgcagatagaagatggagttttttggaatacggatgtcagctgtctgagtaaaattgtaaataacctgatttctaacgctttcaaatatactccggagaatggttccattacggtagagctgcgtattgaaggagaacaactttgcattcgggtatctaatacgggaaaaggaatcaaggaggctgatctcacgaaaatattcgaccgttataagattctggataatttcgaagtgcagaacaagaatgggatttctccgcgaaatggattgggactggccatttgtcacagtatggtaaatctgttgaatggacagattcaggtatccagtattcctaatgaggtgactacttttgatgtatggctgcctgttatggaggttacggtggataatgaagatgaaaaagtagctgaagaattggttttgtcatcagatgagcaagcagtcgaactcaagaattcgtcggttgaatttgataagaacaagcagacgattatgattattgacgatgacccttctatgttatggtttgttacggagatatttgtcggggcatacaatgttgtctctttaggcagcgcagaggaagccttgaagcagttgggcatccagttaccggatttgattatttcggatgtaatgatgcccggtatggatggaatgtcgtttgccaaaaagataaagtcggataaactgttgagccgtatcccgttaatactgctttcggcactgaataatattgacgagcagacgaggggaattgaatccggcgcggaagcatatatcacgaaacctttcaatgtggaatatctggagaaagtcgttagaaggctgttacagcgtggagaggacctgaaagagtattatagctctgttctaagtgcttttgaactggatgatggtcattttctgcataaagaggataaatccttcttcgagaagatgatgcagattattgatagtcatatacagaatacggatttatcagtggaattgttgagtagttcattaggatacagtacccggcagttctatcggaagctgaaaaatgtcacggagaagactcctgccgacatcatcagagagtatcgcctgacgattgtagaacgcttgttgctgacaacgcaactttccattgaagagattatggataaaaccggattctcgaacagggggactttctataaagcatttgcccagaagttcgagatgacgcccaagcagtacaggaatatcaagacgaaggatgttcatgatgcttctgaggaaggaggaggaactatgaacgtataaaactcctgaagacttgacaaacggcttttaatgttgtatatttgtatccttacaataaatgaattaaaacttagaccaatgagaatatcttaccttatactgcatttgttgtgctgatatagtataatatgacaacattttaaccgataatgccttgcttcggaaggcttttcggtagcttgtatataagaaacaggctgcaaacttttgagaggtttgcagcctgttttgttatataaattcggataaatgctatcgaaaagccatgtaatcgtttctaataaacttggataccgtttctaataaacgatcaagaagtttattaaaaactgaaatatagattaggcataacaggtcagtatttttcagcagagtcggatagagaataaatatgttacgtcaatatcggttatgaataggtaaactatatcaacgccttaaatcttcttcttttccaacatcaccttataatggctgttttgcctgttacttctttttcggctttctgcgtgcccatccttcctcgctgaagtcaggctctttatctttaaagaactgttgccagtcgtctgtctttttaggaccacgtgctccgtaaccccgttcttcgcggctgggcttgtcgcttctttttttcttgtcggtcttgtcactgcctttagtcgctctgtcagctcgcggtgctctgtccgatctttcggaacgtgagttgcggctactgtcaccacgcttttcggaggaacttccgaaaggacgttttcctcctctgcgttcggcagaaccactgcctctccggccttctcctgcttcctcaccggcaacttctacagatactttgcggccgttccagttagcgcggttcaacgccttcactacgttttgtgcttctttctcttctacttcgaagaaggagaaatttttcatcaagtcaatgcgtcccaactcgattcgtccacgtgtattgctgttcagtaagctgatcagctcgcttgggaagaaactgtccatttttcccagattgatgaataagcgggtgaaacccggcgctgccttgcggctgcctctttcacggctgtcacgtgtgttacgttcgcggctgtcggtcggagcctcgatctcttcacggtcgcggtagtagtccagaaaacgattgaactcatgcgataccatgcgtttgatcagatcctctttgctcagccattccagcttacgataaatctccggcatgaagtccgtgatttcttcttcgtttaccttcaccttttccagttcatcaatcactttgataagctgtttttcgcagatctgcttgcctgtcggcatttctccggcaataaacttcttgccgatgatgcgctctatctcacgcagctttcctttttcgcgcaggttgatgatagcgatggaagtacctgtctttccggcacgtccggtacgtccgctacgatgtgtgtagctttccgtatcatcgggcaggccgtagttgatcacgtgtgtcaggtcgtctacgtccagtccgcgtgcggcaacgtccgtagcaaccagtaattgcaggttgcggatgcggaatttctgcatcacggcatcgcgctgagcctgtgacagttctccgtgcagtgaatctgcgttatagccttcctgcatcaatttatcggctatttcctgcgtttctttacgggtacggcagaaaatgataccatatatttgcgggtaatagtcaacaatgcgtttcagggctgcatatttgtctttggcttgtacggtataagctacgtgtttcacattgcttgtactttcgttcttgcgtccgatggtaatctccttggcattctgcaagtagttcttggagatgcgggcgatttcggggctcatggttgccgagaagagcaaggtgttccgttctttggggacatcggcaaggatagcgttgatgctgtcggtgaatcccatattcagcatttcgtccgcttcgtccatcactatgttgtgaacggtcgataaagatacggttttgcgctccatcaggtcgagcagtcgtcccggtgtggccacgatgatatgtacgccgcgtttcaggctgcgtatctggctgtcgatggaagaaccgccgtaaactggcagtactttcagtccgtcaatgtattttgagtaatcgttcagatcgcccgctatctggaggcatagctcacgggtggggcaaagtattagtgactggggaaccctgttctttacgtcaatctgttggagcagaggcaggccgaatgcggctgttttacctgttccagtttgtgcaagagctactacatcgttattttctcctaaaaggtacggaatcacttcctcttgtaccggcatgggattctcatatcccatctcttcaattgctttacgtatctccggagaaacgccaagctcttcaaatgtcttcattaaatctctgtatatcttttatttcgggcgcaaagatagagaaaaataatgaataatgaataatggataatggataattattgctgcctgcatagcattctccattttccattaaccattatctattaataaaatgctgcgcaaccgttcgatttcttctgccgagagtcctattccttttttcagatatgcctgtacgctgccgtattccgcatcaatctgttctttggctgcattcaggaagtcttccttggcagagtagattgtagtgatggcttcctgcgagttgatagggagtttatacgcgtatctggaggctttggggatgttgaaatagtcattactcaggcgatagtctttcatgatggcttcttcattgactcccaaagcggcaagtaccagtgctgaaacaatgcccgtacgtcctttgcctgaagtacagtggatgacgacggggtaattgttgcggtcgagcaggagtgtgaacagttctttgtattccttgcggtagttggtgaccagttgacggttcatccgctctactaaacgatagatcgtatccgtttctattttcttatcacgtatgtcttgcaggatgtgttccatgtttcctgttgcaatggggaggtgcaggacgttaaagtcttcatcatgaaactgtggatagttatggcgttcttcttccgaacgcaaatcgatgatagtccttatgcccatgtttttcaattcccggcgggagcagaatggaatgctgtcaatctgtgcggaacggtacagcattccccagcgggtatctttgcctgtttctgcagacttgtatcctcccaggtcacggaagttctgaatgccgggaatattgacgttacgggcagctaccctcacccggtatctgttgttgaataccatcaggtagtaatagcgctgagacggatcattggtcacgatggtctttttccctttcgcaatgttgatggtgactacgggattttcttcgggaatgaagtcgggagaagtggaagcatatacttttacctgtcctttcagtataggtgctgtttcccatttgataatggcgtttcctacattgttctcttcacacactacggatatagtgggcgaagtgccggaacatgacggaagtaccagtaggatggtcagccagtttaacaggtttctgtacatagtttctttgtctgatgaatcatgtactgcaaagataggaattaccgttagatgtggtaattcctttgcgattattagccaaagttaatagtaatttaggggatggttgtatccgtaattacttcgatgcgtactgtccggcaaactccaccgatactgaattactgaaactacggcatacttcggcggcaaagtctttcccgcactgaactactttgtcccagacttcttcattcagattattaaggtcacggtatcgtacatcatatttaagcaatccgtagatcaatcccgcattgaaattatctccggcaccgatggtgctgactgcttccagcggttctatcggatattctttgctgaccagattggtgcgaagtgatactttgtccccaccggccgtgcatataaaccgcgggcagtagaatttaatcttgtctttatatatcttgtccacgtcttgcaagccatacatatagaagaaatcttccagcgatccccgtacaatatcggcgtattccagattctcgataatcgtaggagccagtttcattgcttcgttcttatgtgaagagcggaagttcgggtcgtagtagatgattgctttcttctcgcgtgcctggtccagcagttccagaatcttctccctgagtaccgggttcagcgcatagtaagagcctaccatgacgatatcgtcttcctctaacttaggataaagcacatccagacgttgcttgggataatccttatagaagatatattcagcatcgctctgttcattgaggaatgccagtgatacaggtgatttaccatccgggaagacatttacgtgatccgtcggaatattattttcacgcatgaattgcagaatgatatttcctacccggtcattacctgtttcactgataaaacctaccttgatccccattcgtccgagggatacgatgccgttgaatacagagcctcccggtacggctgcggaaggctggtttccccgaaagatgatatcgaggattgtttctccgataccgattacttttcgcatagcgatcttgatttttcgcccaaataaccaccgtgatggcgttttgagtattcttcgatggtgaatcctgtcttcttcattgtctgtactaccagtatgtcaccgatgacggtcatggcggtagtcgatgtagtaggagtcatgcctaacgtacaaacttcggcaggtttaccggtgctcagacagacgtttgattcgttggccagcgggctgtcgggatttccggtgataacgataaacttcagttccgggtccagattatgtgccagtcgggtcagttccacgatttcgcgtgttttgccggagttggagataagcaggagcaaatcgtttttttgtaagatgccgaggtcgccgtgctgcgcttcactggggtgcaggaagaccgatggaatgccggtggagcagaaggttgtggcgatgttcatggcaatctgtccggcttttcccatgccggaagttactaatttcccttttttctgatgtatctgttctacaatcagttgtactgctttctcgtaagcgtctgttacagggatattgagcactgcttgtgcctcttgttgcaagagttgtttgatggagtctatcatataatcagtttattttttcttttaattcatccagattgtttgctgtttcataataggtagagaaagattgtcgggcgaagcccttatcctctaacgtcttaagtgcagccagaagttcattataaaaaccgtattcgttatagaagatcacctttttctgatgatatccgatagaggcggcggctatgacgtggaaaatctcgtcgagtgtacctacaccaccaggcaatgcgaccaatatctccgacttctctgttatcacatctttccggtcgctcaggttacgggtatgaatcacctcgtccagtaatgtgctcacactacctttttcttccagtttggcaggaactactccgatgaccgtaccgccattctctttcacggcgcgggctacgcattccatcagtccgagattggctcctccataaatcaacgttttgcctgcttttcccatccattctccgatttgacgggcactgtcaaagtacattttgtcaatgttttccgaggcagaacagaatattcctatctttttcatacacgttgttgctaatatagtctacaaatatctgcaattttctataaacgacaataagttttattgtatttttgcggcattaattcaataaggaagtagaaaacaatgcattacaacgaatatacattgccgaatggcctgcgcataattcatgaaccgactctctcgaaagtagcttattgtggttttgccatcgatgccggaacgcgcgatgaggctgaggatgagcaggggatggctcatttcgtggaacatcttatttttaaagggacggagaagcgaaaagcgtggcatatccttaaccgcatggagaatgtgggcggcgatctgaatgcctatacgaataaagaggagacggttgtctatgccgccttcctgaccgggcatctggaacgcgccctcgaattgctcggagatattgtattccattctactttcccgcagcatgaaatagaaaaggagacggaagtgatcattgacgaaatccagtcttatgaggataatccttcggagttgatcttcgatgattttgaagatatgattttccgtaaccatccgttgggaaggaacattctcggtaagccggaactgctgcggagtttccgtacggaggatgttctctcgtttacccgtcgcttttatcaaccggggaatatggtattctttgttcagggacaacatgatttcaagaagattatccgtctggcggaaaagcatttgtccgatatcccggcagtgacggtggataatcagcgtatgcctcctcctctttatgtgcccgaacggttggtagtgcctaaagatactcatcaggcgcatgtaatgattggtagccggggatacaatgcgtatgatgataagcgtacggcactttatctgctgaataatgtgcttggcggtccgggcatgaacagtaagctgaatgtatcgcttcgcgagcggaggggattggtgtataatgtagagtccaatctgacttcttataccgatacaggagctttctgtatctatttcggtacggatatcgaagatatggatacctgtctgaaactgacctataaagaactgaagcgaatgcgggatgtgaagatgacatcttctcagctggcggcagcgaagaagcaactgataggccagatcggcgtggcatctgataatttcgagaataatgcgctgggtatggcgaaaacatatctgcactatcataagtatgaatcgtcagaatcagtgttccatcgtattgaggcgttgacggcagaacaactgctggaggttgctaatgagatgtttgcggaggaatatttgtcgacgctgatttataagtgaaaccttgagtgaagaatgtcatatttcctacaaaactttaatactctaatgaaaaataaatgtttgctgttgttgctgtttgcttcttttccgattttctcatgggctgatgaaactcttgattcactattgcatgtccttgatcagacaatcttggcacatgacacttatgtggtacagcgcgaatcgcggatacggcatctgaaagagcttgccggagacgtggctcctaattccatagaacgctataatctgaataatcagatctataaggaatataaagcctttatttgcgattccgctatttactatttaaatgagaatgttcgtatcgcgggtaatctgggagatactgaccgggaaatagaaagtaagctgcaactttctcttttgctttcttctacgggtatgtataccgaatcaattgatgtcctgaagtcagtagaccgacagaaggtaacttcacatctgatacttgattattatacatgtttcgatcatgtgtatggtgagatgggattttatacacaagatcagacgttatctgcttattatcgggaaatatcgtcagcatataaagattcattatatgcgatattatctcctcaatcggaagaatttatggtcatgcgcgaaacgttgtttcgtgaccggcacaagtatgatgaggccttggagataaacgaccgtcgtctgatggcagcagagcccgatacgcctcaatatgcacttgtaacttaccatcgctcacttatttataaatatcttggagataaaataagagagaaacagaatctttgcctttctgctatctctgatattcgttctgctattaaagatcatgcttctttgtggatgttggctcagttgctctatgagaatggcgatatggagagagcttaccaatatatgcgtttctcgtggaatgctaccaaattctataatgctcgtcttcgaagttggcagagtgccgatgtgctttctttgattgataaaacttatcaggcgatgattgagaaacagaacgaccgccttcagcagtatttagtgctgattacggcattgctggtgctgctgattggtgcgttgggctatatataccggcagatgaagaaattggctgttgcaaggaatcatctgcagacagccaatcatcaattgaatcaattgaatgaagaattacagcaaatgaatgcctgtttgacatctaccaatgcagaactgtctgaatctaaccagattaaggaagaatatattgcccgttttattaaactctgctctacttatatcaatcggctcgatgcatatcgtcgtatggtaaataagaaagtatctgctggtcagatagcagaattacttaaaatcacccgctcacaggatgcccttgatgaggaattggaagaactatatgccaactttgatactgctttcctgcatttatttcccgattttgtgaagaagttcaatgcattgttgcaagacaatgaacaaatcattctgaagaaagatgaattattgaataccgaactgagaatttttgcattaatacgtcttggtattgaagatagttcacaaatagcagagtttctccgttattcggtgaatacaatttataattatcgggcgaaagtaaaaaacaaagctcgtggttccagagaagatttcgaagatttagttcggaaaatacgttgatcgatgttgtaacctatccactttttaggcctctttggttgatattaacttgctgtttattagtggtttgtctgtttgtataatccacttattataccctcattgtcaaatcacttcagtttctttatacttttgacctgtgcttctgaaatagtggcgaaagtcctgtcaagcacataccttaattataaactttaaaattaatacgcatgaaaaagaacaggcgaaaaatcctttcggggagtcgcaagattctctttgctatcttagcagtatttttttctctgagtgcatccgcacaacaatttactgcatccggtcaggtgctggatgcacagaaagaaccgcttatcggtgtaagtgtacaggaaaaggggacaactaacggagcgataactgatttagacggtaactttacattgacggtccggtccaatgctactttaatattctcttatgtaggatataaatcgcaggaacagaaagcatcccgacagatgaaagttacacttcaggaagacaatgaagtacttgaagaagtagttgtgatcggctatggttcggtaaaacgtaaagatgttacgacagccatttccactgtgtctactaaagatcttgatgtacgtcccatcgtttctgccggacaggctattcagggtaaggcagccggtatctccgtaattcagcctagcggtacgccgggaggagagatgtctatccgtgtgcgcggtactacttctatgaacggaagtaacgatccgctatatgtagtggatggtgttcctgtggataacattaagtttttatctccgaatgatattgaaagcatgcagattctgaaagatgcctcttcggcttctatttatggttcgcgtgctgccaatggtgtaattctgattacaacaaaggccggagcgaccggaaaggcaaaagtctctctgacagcacagtttggcttgaacaaggtggcggataaggtagaatctctgaatgctgcgcagtataaagagttacaggatgaaatcggactggtatccttgcctgatggactgcccgaccgtactgattggtttgacgaaacatataagaccggaaagatgcaaaactatcaggtagcagtatctaacggtaatgaaaagatgaaatactatctttctgccggatatctcgatgaaaagggaatactggatatctcttattacaagcgttataatttccgggtgaatcttgaaaatcagattcgtagctggttgacagtaagtgctaatatctcctactcggactataccagtaacggagggggagcgatgggaacaggagcgaatcgtggtggcgttgtattggctgttatcaatacgccgacatatgctccgatctgggatgctttaaatccgaaccagtattacaataacttctatggagttggaaatatcaccaacccgttggagaacatggcacgtgcaaagaataataaagataaggaaaaccgtttgctggcatcgggcaacgtgttgcttaccttgctgccggagttgaagtttaaatcaactctaacacttgaccgtcgcaatgctgtaaatactacttttcttgatccgatttctactgcctggggacgtaaccagtatggtgaagcctccgacaaccggaatatgaatacggtattgacattcgacaatgtatttacttacaataagaacttcaagagacatggcctggaggtaatggcagggtcatcgtggacggattcagactactctaacagctggataaacggttcacactaccgcaatgatctgatacagaccttgaatgccgcgaacaagattgcctgggataataccggtacaggtgcttctcaatggggaattatgtcatttttcggacgtgtagcttacaattttgatagtaagtacctgttgacggctaacctgcgtgccgacggttcttctaagttgcatcctgatcatcgttggggggtattcccatcgttctcagctgcctggcgtgtatcttccgagaagtttatggctgatctgacgtggattgatgattttaaaatacgtggaggctggggacagacaggtaatcagtctggtattggtgactatgcttatttgcaacgttataatatcggtcgtattgaatggtttaaggtagcggctgaaggtgatacaacagattatgcgaatgcggtaccgactatcagccaggccaatttacggacgtctgaccttacttgggaaacgactactcagaccaatattggtctggacctgacagtattgaatggacgtttgacttttaacatggactactattacaagaagaccaagaacatgctgatgaacgtatcactgcctgccggtgctgctgcagctacttctatcgcccgtaatgaaggtgaaatgactaataaaggttttgagcttaccattagttcgaagaacttccgggggggagcatttacctgggatacggacttcaatatttccttcaaccggaacaaattgacgaaacttgaattgcagaaagtgtactatgatgccaaaactgcggatgtagtcaacgattatgtagtgcgtaatgagccgggacgtgctttaggaggcttttacggatatatcagtgacggtgtagatcctgagactggtgaattaatgtatcgtgacctgagtggtgatggtaaaatctcgacttccgaccgtacttatatcagcgacccgaatccggactttacttatggtctgaccaacactttctcatggaaaggatttaatttgagtgtgtttatccaaggctcttatggaaatgatatcttcaatgcttcccgtatagaaacagaagggatgtacgatggaaagaatcagtctaccaaagtactgaaccgctggaagatacccggacagataaccaatgtgccgaaagctaatttcaagttgctgaactctacttactttattgaagatggcagttacctgagattgaaagacgtttccttgtcgtacaactttaagggcaaattactgcagaaatggggaatcacccgtctgcaaccttactttaccgctaccaatctgctgacatggacaagctactccggcatggatccggaagtaaaccaatggggcaacagcggtacggtgcaaggcatcgactggggtacatacccgcattctagatcatacgtgtttggtattaatgttgaattctaatgaaaggaaagactatgaaactaagatatatattttatggactcacttccggtttgctgttcggactttcttcctgctcactgaattacgatccgatcgatacttattcggatgtgactgaaggtgtgacggataccggtacaaaggtggtatttaaagataaagcggctgtagaaagtcacctgacgactatctacaatcaaatgcgcgaccgtcaggaacactggtatgtggacttgttgctcatatcagattcgcatgcggataatgcgtacgcaggaactacgggagctgaggtacttccgtttgagaacaattccatcgaaggttccaactctgtgctcgaacgtgactggaaccgttatctggaagacgttgcccgtgccaataaattgatatgtaatattgacttggtgaccgataactctttgactactgccgaacgtgcgcagtataaggcggaagcaatgatattccgtgccatggtcatgttcgatatggtacgtctgtggggggatttcccggttattacaacagtagctgatgatattacttcagaaaatatcgaagatgtgtatgaacaatatttcccggcacaaaacacagaactggaagcttatcagcagatagagaaagatttgctggctgccatccagcatgcgccggataatacggcaggcaacaaaactctgtttacaaaatccgtagcccgtactcttcttgcaaagatctatgcagagaaaccgttgcgtgactattcaaaagtaatccgttactgtgacgaggtgaaggctgatggttttgagcttgtgaaggattttagcgatttgttcggcatgaatgctgccggaacggatgcaaaagtccgtaatactaaagaatctatactggaagctcagtttactcccggttcgggtaactggtgtacatggatgttcggacgtgaccttgtaaactggaataataacttcacttgggcaaaatgggtaactccgtcacgtgatttgatcaatgctttcaagaaagaaggagatcagattcgctttcaggaatccgtagtttactatgattgtaattggagcaactattatccgtcggacaattatcctttcatgtacaaatgccgttcggctaatagcagcattattaaataccgctatgctgatgtgctgttattgaaggcagaagcattgatcatgcaggatacgccggatctggaagcggcagctaagatcatcgacgaagtacgtgaacgtgccggattgggtgaattgtcttcatccgtacgtaaagaccgggatgcgatgattaccgcattgctcaacgaacgtcggctggaactggcattcgaaggacaacgctggtttgatctggttcgtctggataaggtagaagaggtgatgaacgccgtatatgcgaaagattcaggtcgcaagtcacaggtttacgcctttgataagaactcttatcgcctgcctatcccacaatcggtaatcgatgccaatgacaagattgaacagaaccccggatattgatagagccggagataacatcgcttataatgtatttaaatagaaaaagaaactaacgattatgataaacatgagaaatatagcactgacctttttaggatgcttcaccatattagcggcttgtagtaatagtgatgatgcggaaaaaccggtagtacctgtccccaccggagatgtagccatttatacgacaaccagtagtctgacccgtgatttgacccgtgatgcggttaacttcagcccgaaagacaatctggctccgaccacaataactttgaatcctgcggaacagtaccagacgatggatggtttcggagcagctatcacaggttctacctgttacaacctgttactgatgaaaccggctgaccgtcatgctttcctgacggaaacattctccgacaaagatggtttcggattcagttacatccgtatttccatcggttgttcggacttctcgttaagcgaatatacctgctgtgatacgaaagggatcgaaaactttgctttgcagagcgaagaaaaggactatatccttccgatcctgaaagagattctggccattaacccttctatcaaggtaattgccgctccttggacctgtccgaaatggatgaaagtgaaaagcctgacagaccgtacaccattggattcgtggacgaacggacaattgaacccggattattatcaggattatgctacttattttgtgaaatggatacaggcatttaaagccgaaggcattgacatttatgcagtaactccgcaaaatgaacctttgaaccgtggcaactccgcttcgctctatatggaatgggaagaacaaagagacttcgtgaaaacagcgctcggtcctcagatgaaagctgccggactgtctaccaagatttatgctttcgaccataactacaattatgacaatatcgaatcgcagaagaactatccgggcaagatttacgaagatgccgctgcttctcagtatctggcaggtgctgcttaccataactatggcggcaaccgtgaagaattgctgaatatacatcaggcatatcctgagaaagaacttctgtttacagaaacttctatcggcacatggaacagcggacgtgacttgtcgaagcgtctgatggaagatatggaagaggtagcattgggaacaatcaataattggtgtaagggcgtaattgtctggaatctgatgctcgataacgaccgtggtccgaatcgtgaaggtggttgtcagacttgctatggtgcggtagatatcaataacagtgattataagacaatcatacgtaactctcactactatatcattgctcatctttcaagtgttgtgaagccgggagctgtgcgtatcgccactaccggttatacggacaacggtattacctgttctgctttcgaaaatacggacggaacgtatgcctttgttctgataaacaacaatgagaagtcgaagaagataactgtcagcgacggccaacgtcattttgcttatgacgttcccggtaaatcagtaacttcataccgttgggcaaagtcaaagtaagaaccttaaaagtataaagacaatgaaaaaaagtatctatataacattggcattggcgggaatcttatccatgaattcctgtaatgatgacgagttccttcccggtaatccgagtatggagatcaaggcggagaatgcggatgcccttttcggcgacagccttccgtttacgatcaaggcttcggatgtagacgttcctctttctactttgaaagcgcagcttttctatggagaagaacaggtatctgaaacggtgatccgaacaaagacaagtggaagcgactatactggaaagatttatattccttattatgctaatattcctaacggaaaggcgacattgaagtatatccttcagaatattcactttactacgacggaacaggaaacggaacttacgttggcacgcccggactttccttatctgaccttggtagatgaagaaggacaggagtaccggatggacaggcaatcgatgtatcattatagcgtatcgggagacttttcgcagaagatgaaagcgtatatcaaaactccgaaagtaggggagcacggcaacgagctaacttttggctgggaagacaatacgattgcagtaggctctactacgtctatcccgttctccaatacagagccgggcaattatacgattcagtttaatactttcaactatgaagcaagtccgtttgccaaattattgctgaacggaaaagaaatggaattggtagaaaacgatgtatatgctgttaaactgtcgttaaagcagaatgacattctgacgttcgaaggagtgcctgcttatgatgaatggtggattgatccggacttctttgaaaagcaggaggatggaacactgaagttcctgccgattgacggaagctatcagattacagcaaacggtaagagacagtacttctctgtcatagctttaaaagacggtgaagcagctaaattgcaggatgacggaacaggagctatctgggctatcggaaatggaattggcaagccgtcggtatctttgtacgaagtgggatggacgccggagaatggtttgtgtatgccgcaacttacggcaaagaagtatcagcttacgtttactgccggtgtgactatgaaaacaagtgatattgactttaaattcttccacataaacaagtgggataatggtgaatttaagggagatgccatctctactacaagcgaccttgttgaaataacagagtcgggtaacttgaagttgcaggaaggtcagaaatttgagagaggcggtgtttataagtttacggtagatgtaacgaaaggtaataccaaagcagtactgactgtagagaaagtaggacaggtagacttgccgcgaccggacattacaatcaatggaatgaagctggaagaaggcagttccgatatgtatcaattgcagatgtctttgacgcagaaccagacactcgaaataggtggcatcgaagatctaaatgattggtatgttgatccggattatctggtgaagaccggagataatcagttgaagttcttgccggttgccggtagctacagggtgatggtaaatgctacacgcaaatactttgcagtaatacgtatgaatggcaatagtgaagccggactggatgctgacgggcatggtgccgtatggttgttgggctatggtatgggctctccgtctattaaggacgaatttaactgggacttttcgactgcttattgtgtggcggaaatcagtccgaaagtttatcagtttactgggaagactggtgctgaaggcagtacggttattggtgaacgcatacgatacgattatatcagtgttaaatatctgggtggaaagtcttgggatcagcaatttcatcaaaagaacctgcaaatggatcaggctacccggaacttattcaatgttgatgaggaaaatcttgtattggcctctccgttggaacagggagttacttatgtgtttacgttagatttcactcaggggatagataaaggaattctttctgttgtgaagaagtaaaaatacagaaatcatttatgaacatgaaatttaaagcaacgttacttggcttgtctatagccgccgttttaccgactatgaatatggcgcagacaccagtatatctggacacgagcaagcctatcgaagaacgggtgaaagatgcgctgagccgtatgacacttgaagagaaggtgaagatgactcatgcgcagtctaaatttagttcaccgggagtccctcgtctggggattcccgaagtatgggcaaccgatggtcctcacggcatccgtcccgaagtattatgggatgagtgggatcaggcaggatggacaaacgattcctgtatagcctatcctgcattgacttgcctttctgcaacatggaatcccgaaatgtcttacctttatgggaagagcattggcgaagaagcccgttaccggaaaaaagatattctcctggggcccggtgtcaacatctatcgcaccccgttgaatgggcgtaattttgaatatatgggcgaagatccgtacctgtcttccatgatggtagttccttatattaagggagtacaggaaaacggtgttgctgcttgtgtgaagcattacgcattaaacaatcaggagttcaaccgtcacaccaccaatgttcatttgagcgaccgtgctctttatgagatttatcttccggctttcaaagcggccgttcaggaaggtggtgcttgggcaataatgggagcttacaacctttattcgtttagtgaagataccgactccggtaagctctataagactcagcatgcgtgccataataagcgattgctgcaagatattctgcgtaaggaatggggctttgatggtgtcgtcgtttcagattggggcggagtacatgatactttccaggccatttcgaatggtctggatatggagttcggttcatggacaaacggactttctgccgggacaaggaatgcttatgacaattactatttggcacatccttacctgaaactgatccaggacggcacagtcggaaccaaagaactggacgaaaaagtgagtaatatcctccgtctgatcttccgcacttcgatgaacccgtataaacctttcggttctctggcttcgcccgagcatggacaagccggacgcaaaatcggtgaagaaggaattgtactgttacagaataaggataatgtattgcctattgacttgaagaaagccaggaagattgctgttatcggtgaaaacgccattaagatgatgactgtagggggtggtagttcttctctgaaagtgaaatatgagatatctcctttggacggcttgaagaaccgcgtaggttcacaggcggaagttttgtatgcccgtggatacgttggtgacccgacaggggaatataatggagtacagaccggacaggatttgaaagacgaccgttcggaggatgaacttcttgctgaggctgtagaagtgtctaaagatgcggattacgtaattttcttcggtggactgaacaagagcaatcatcaggattgcgaagattcggaccgtgcatcccttggattgccgtatgcgcaggacagggtgattggcgagttggcaaaagtaaataagaacttgattgtcgtaaacatctccggtaatgcggttgccatgccttgggtaaatgaagtgcccgctattgttcagggttggttcttaggttcggaagccggaacagctcttgcttcggtactgctaggagatgctaatccgtcggggaaacttccttttacttttcctgcaagactggaagacgtaggcgcacataaactgggtgaatatccggggaataaagaagagctggcacactccaagaacaatggtgataccataaacgaaatctatcgtgaagatatttttgttggctatcgctgggcagacaaagaaaagatcaaaccgcttttcccgttcggacacggattgagctatactactttcgcttacgggaaaccttcggctgacaaaaaggtgatgactgccgatgataccatctctttcacgatcaacgtaaagaatacaggtactcgtgaaggtcaggaagttatccagctttatgtcagcgataagaaatcctctctgcctcgtccggtcaaggaactgaaaggcttcaagaaagtaaaactggctccgggtgaggagaaggctgtaacgctgacgattgataaaaaagccctgagcttcttcgatgatgtcaaacacgaatggatgacagaaccgggtaagtttgaagcagtcatcggaacatcatccagagacattaaaggaattgtaccatttgagttgagataggtatccggttggtaaaactggggtcctcccccggtaaaacagattgctgggagaatgttgttatcttataaaagagagagtcacaacattctcctttttctttgaaacgagtttggcttgtgattagaaataaggcttataccttgcattttactgtggtatatgcaatttagaatgaatttctttttcctattctgatttatgtcctatctttgtagtgctcttttttcaaaatcacacaaggctggaaacctgccttgtaattgtggcaggcatttttatgcctgtccggttcattctatatgggcggtttcgcacccccatgtagagtgttaatgcacctgctgccttgtgtgaacgagaaaagagcaatgggacaggcggaaccgcttcttttattatctaaaaccacctttctgtttagccccgttgaacttaatttattcaccatttaatttaaattcttatgaaggaggttttaaacaaccagcagattgtttgtccgggggacgcaacacaattcatgcatgccattttttcttcagatcatgaaatgatgaccttttatcttacgctcaatcgttttataaatccagccagttatttggtggaacgctcggatcggcaaagactggaagatttagagaatgttctttttggtaatgtagcagccttcgaggcagttcatcattttaagaaaattagtgtaaaagatgtgattaaaggatttggtatgcatatgatgaatatgcaggtttcaaataccaatcgtatgcaaagtgccaatataatgggctcttttatagattgtattatcgatactactaaaaatagttggcaatataaacagatgtaccgggtcaatcatttacatcttgagaatgtcagatatttgctgaatcgactgaatgaagagtaatctgttgaaggaaataatagtgacctgatgattataatttgtctctttctacagagttaaaaacgttattcttattgtcacttgtcacttttcagacttaatgtgttgtaatttagcgtgataagggtgataataggtggtgacaatagggtgataatagagaaaaatcgcttttctattgtcaccttcataagagattctgccttcctgattcaggtaagacggttcatttaatggtctgtgctacgtttgttaagctgttttcaacgttagattaatgtattacggtcgttacatttcttcgtttcacgtctgtaatcccatgagttcatgtacgtgaaccgatgggatcacgtacgcagtcccaacggtttacgtacgtggaacgaaaacaggaagcggacaaaagatattaatcaaggcttgtccgcctgttaaccttaccgggatatatgataagatacgtagtgtcaggacgtttgatgtctttgtctggctattataatgttatttacttgttaataccaacaaactctccggtcccatattgaaaagcaggtcaataatactcagattagggagaaaaccgagtttggaatcaaagacttggtaatagggatgcggaataaattccgggtcggctatccggaaatctttcttaggatgaataatctcgcggaaatctgtttcttctgttgtgaattccgttttatattctgaagttcgttcaatgcaaggttgaatgtctatcaacttacagaccagctggcagatttcttcgttgaaatcggctaaaaactcgtatttcttctcatagaaaggtcggaagtcgtctttataatattcaaagtaaggagtgctgttgtaggctgattcgatagcattccaatgcagatggcgccagttaccgtgatcggaaatacgtatatccttcatcggacatttcagcgtatccggtttgacggttggaatggagagtgccagttcgccgtcaggtccggcaatcgtacaacggttgcgataggtttgctttatataatgatcgtgttgttcgacatatattttatcatattccaatagtttggtataatattctaccggagcaaggtaggcagatgataaataagctattctcattattttatgtacagatgttatgttgaaaactatgcatgtgaattattttacagactgaaagaagcgattccatcggtatccgtcaaagattcccgttcctttttctttagagaaccagatcaacgatgctttcccgatgatatggtcttgcggaacgaatccgaacagacgtgaatcggacagattgacactattgttggaagccatccagtagtaatctttggtaaaaaaacaatgctgtgtgggttttccgtcgatataaagcgtatcattctttatttccgcctgtttgccttcgtgcatcacgagggtatttcgcagcaatgtgatattccacggatatactcgtagtgctttccctttgccgggaacgatgagcggtttaagctctttttcgctcttttccgtcaaaggctgaatccagttctgatcgctgatcgcttgttccagtaagtaatattcatagcggctgaaactgcggacatgagtactgtcattacttcccatcagtccgtcgttggtgatggaaagggtttgcataagcgaagtgatcaactgctctttggcagcgggataggtgtagagccttttcttgtccggattgagttgcgcttcgggagaggatacggagaaaagggaatcgacaagcagggtatcaccgggagtaccgatacaacggctgatatagatttctcttcggtcaatagtcggttgcccgatggcggcgggattattaaagactacaacatcttgttgccggacagatcgctcgcaccagcggtgatatgagaacagtgacatcagcggaacccgcaggccgtagctccatttgttgaccagaatacgttcaccctgaaaaagtgaattctccataccggtggaagggataaggcaggatgtaaaagcgaatccccggagcagaagcacgacggctattgctccggcgaatgcgaatatccatttgaatttacgaatgttcatcaatttctatcaccttatcactctatcacgtctgtatccttatcagtctacccacttgaagaggcggttccaacggatttttccgtcaaaccatccgcggtctttgtcaagtgacagccatacaacgataggtttacctactacatggtcttcaggaacaaatccccaatagcgggagtccgcagaattgtggcggttgtcgcccatcatccagtaatagtccatcttaaaggtatattgatcggttttctcgccgttgatataaataccgtccggcttgatttccagcttatttccttcgtaagcgacaatacaacgttcgtagataggcaggttatcttcagtcagagtgatagtagcacctttggcgggaatccagatcggaccgtagttgttacggttccatttggtatgtaagttgagcgggtacatctgtccggcatactcttccggttccatgacgatcttgctgatgagctttttgttgccggataatgtttcgtacattttcttcgtcagcggaagatgataaataggagccatctttccttgtgcattccgattgtccagtccgatctgtctgaaggtttcttcccatgaagaatcatcatacaatgtctggtctgccttgctgatgcctaattcacggaacatatcttccgtgatatacgggcctgtggtctgtacgaagtagttgaactgcagattttcgggattctcgatagccttgccgtcaatcatgacctgaccgtctacgatctgcagcgtatctccgggcagaccgacacagcgttttacatagttttcacggcggtctaccggacgataaacgacctctccgtaaacacgcggattcgatagaatttgctggcgaccggcattataatacaaatcgtaaacagcacgttgctgctggcgtgtcagactgtccatctctatctgcttgggatacaggcgctgaccttcaccgtaggctatagagtagaaatctgtttgctgattgttgagcgctaccgtatcaccggcaggaaagttgaagacaacaatgtcattgagtttcacttttccgaacccgggaactcttttatatttccactgaggccattcgatatatgatttggtatttaaaataggcagcgtatgttgcgccaacggcatggaaagcggcgtattcggcacacgtggcccgtagctcatcttgctgacgtacaggaagtcgcctaccagcaatgacttttccaaagacgaggaaggaatctgatagttttggaaaatgtagatattgacaaagtagacagcaaccaatgcaaagacaatggcatctacccaactcataacattacgaacggtaggattcttcgatttcttccagaatgaccagggtattttcttggtgatataaatatcgaagatgaaaggaacgacaatcagcccccaccaactgcgtacccagatgaggaaggcgagataaaggagaatagcaatggtgcatttgatccattgtgtgcgtgtggcttgtctcataatctatattcgtttgatagtggctttgaagccttattcgtttaagaatgggaataaatcactcatgcccagatatccctcatgttgggccgtgtattcggcagcaaggatggctcccaatacaaagccgccgcgattcttagcatcgtgcgtgatggaaatgctgtctacttctgactcgtagcggatggtatggatgccgaaaacctctccttcacggatcgagtcgataggaaactcgttggaggcgcaggcgtcggtgccgctgacggtaccgtccggtgcaaggagcgttccttttacccatttgtctttgcggtccatgttttccagtatgccttcagccagtgtgatggcagtgccgctgggtgcatccagtttatggatatgatgagtctcgctcatggtgacgtcataaccggggaattgattcattatttttgccagatacttgttgacagatgagaagatggctactccaagactgaagttggacgaccagaaaagggtttttcctccttcggtacatagctttttgatttcttcgccatgttccgccatccatcctgtactgcctgatactaatttgactccggctttgaaagctttcatataattgctgtaggctaccatcggattggtgaactcaatggctacgtcggcggacttgaatgcttccgactcaaagtcttcctgattatcaacatcaataatgcagacaatttcgtgtccgcgactaagggctgccttttcaagttccttgcccatttttccataaccgatcaacgctattttcattgttttctgacttatattcaaaataatagtcgcaaagataagatttttattacatttgcagtgcacattaactttctgttaacatggaacaccttctccactatgtgtggaaacataaattattccctctcaaaatactgcaaaccaccaaaggcttactggtagaaattatcgattccggactgcagaaccctgatgccggtcccgacttctttaatgcgaagctgaagatagacggtacattgtgggtgggaaatatagagatacatactcattcttcagactggtaccgtcacggtcacgaccatgataaagcatacgattctgtgattttgcatgtggtggccgaggcagacgccgaagtaacccgttccaacggtgagcaaatcccccaactgctattgacctgtcccgagaatgtacaaacccattatcatgaactctgcattgccgaccaatatcctgcctgctactccatcatagggtccttatccaaattaacgattcactcctggctgacggctcttcagaccgaacgactggagcaaaaagcaaggcaaattgccgaccggctggaacgatgtgaccgtcattgggaagatgccttctttatcactcttgcccgtaatttcggtttcggcttgaatggcgatgcttttgagacgtgggcaggactgcttccgttccgggcgatagacaagcatcggaatgatctgtttcagatagaggcttttttcttcgggcaggccggtttgctggaggaggcgtttttaaagagggagcaggaagatgagtatagtctccggcttcgtaaggaatttcgctatctgcaacggaagtttgaaataactcaggtgatggatgccggtttatggcgttttttgaggcttcgtccggaaaacttcccccatatccggttagcacagttggcctacttgtatcagaaagttgataagcttttttcgcagatgatggaggcagaaaacttgccggaagtgcgtcaactactgtctactcatgcttctgcttattgggataatcattatatattcggccggccttcttcgcagaaagagaaatcgatgggagagaggtcacaggacttgattgtgattaataccgttgttcctttcttatatgcttatggtctgcatagaaccgatgagcggatgtgtgatcgtgccggacgttttctggaagagttgaaagcggagaataatcatattatccggtcgtggggagatgccgggctaccggtcggttcggcggcagatagccaggcattgatacagctccgcaaagagtattgtgataaacggaaatgtctcttttgccgtttcggatacgagtatttgcggaagaaatgagtcgtttatttctctaataacttatagactgcattgagaagatcattttccctgttgggtctgggggcgtcacggtttacgatgtttccttccttgtctatcaacatataggtggggaaggagcgaacctgcaggaacttctcaatagccctttgctgctcatcgggcaagttatagtggacggcaattttgccggtcagtccatattccttgataatgtttttccacgatttgtctgaggaatggttgcagagatataagaatatcacgtcttttccctcaaacagtttcttggcgcttcctgcatattgcatcatgtccttgcacggaccgcaccaggtgccccatacatccagataaaccactttccctttataaggctcaatgattttgcggaataattgttctccgtctgtgatctctgccagaggttcgttaggcatcaggctttcgggatattcgatggccttatgggatatttcttcgtatatcccttgttggtttaatacataagcctgtagggaaggattagaaacttctgctttgaatttactgatgaggctgtccggcaattctttgtgagtctgctgcaacatctcataatagcaatttgcctttagtatctcctttaatttttcgtccatttgcagggagtcaatgatagcaagggtacgattgatggaattagcgagcaagtttcccatcatatagtcattgaaaatttcgtctctgcctacgaggctctgtattgttttgatgctcggttccatctttttgttgtaggcagccattgtcagcgagtcagcagtattcgcagctttcattttttcaatttctttttcgaagttactgaaggcgtgtaatgcgtctttttcttcttgtgatagctgaatctttccgtccctttcaaatttaagatagagcatttccatcttttgaggagttacggtcaatctgtttgaagaagcgggagcaatgtccgttatgtatccgacgtaatcccgcaggaaagaaccataatctctgagaagcgtataaggctctaccggacggggatatagtgccgagtctacataactcataaattccggttgcagatgctcctgcttgttacggtctaccgaaaagcggcgttgcatcaggtcgcgtgcagcgttgtagcggatttcctgttctgtgtaatagcggaatttgtgcgagagaagcggatgatcattgagcatctttgcgcgatattctgatttatgacggatgatatcctgcgtcttttgcaaatattccatattacccatctttttcccttcgtcgtagccgatatattcactgagcccttcgtggctcagcagttcgttgaggatacgtgccttttctcccatcactaatttctttttgtcagcgaagtccacatagaggaaatagctctctcccggctctacggatgtccagatagtggtacgtccccaatcgatgaacacgttgtggctgttcaatacagggaaacgaagggtaaatcttcccagtgagtcgatggcggtggtatatttttcttctctatcggtgatcatatccggcacggaaacttcgaaaggacgtgtcgaaggcaggttacgcaggtatccgatgagagtcacgctatccgtttgataaccattgtcgacgaaaggagtggtgtcagctaccggataatcgggtagatacttgtcgttacaaagaacatatgtctgtgccttttcttttccgacagacagggtgcaggatgtttcatctttacgagttaaacgcactttcagttgttccgttccatttttcaggatgatggtggttcgattcttttggatgcttatcgactcataatcccaaaattgacattggtagacagcaaagtcttcgaagaatccgatgcgccagtctccggtcgcttgatttatccaacatccggcgaaagcatatatttcagggcgtgaggcgatgggagagactttttcattttgcagttcagcggctacgttcattgttttcggcagggggaagctgaggtaaagcagtttgtatgattctccgcttttgacgagcagccgatattctttattgagaaaatatccggccgataagatatcccatgtttttccgtcatagagcagttttccgtcacgggtgaattcgtagattacttttccggataatcctttcacccatttctgataaacacggtcgggcaatgtaaggggagtgagcggttccgtgtggtcggggacttgcttgcggatacagttcttcggctctttccagcctttgtaccagatggtggcggcgtcattgccggtaggtgtgatacggaattccgtcgtatctcctttctgattgcgtaaatggaagaagtagctgccgtcagcttcctgttttatctgttcggcataaaaaacgacataatagttctctacgaaattctctccgatgagcggaccgttccagtcagacacattgtctgctttaaattgccagtagcctcgcaaagattcgggaattgtctgataagtgccggattgggcgaaagcgatagtctgtgtactgcataaaagcaaaagacctatcaggagaaaacagtaggggggtctcatggtgtatttttatttaagttagtatttcgatttatgacaaaggtattttaataccggaataatgaggtgtggtaagtttattatttgtagtagtttaactattttcttcccgattcgtatcaagatattgaacttgtcattatctttgcagcgttattttaaactcttaatttatatcgtgttatgagagctaagaagtttgcatgctgtttgatggtcatgtcattgctggcaggtatttcatttatttcctgtggcaatagctccagggcgaaagtagaaagtgaagcagcacagacaggagaagatttcaagtcgtttctggataagtttacttccagtgcggcgtttcagtatactcgtgtcaagtttccgttgaaaacgccggttactttattggcggatgacggggaaactgagaaaacgttcccttttacgaaggaaaagtggccgttgctggacagtgaaacgctgaaagaagaacgtatcactcaggaagagggcggtgtttatgtatctaagtttacgctgaacgaaccggcgcataaggtatttgaggcgggatacgaagaatcggagatcgacttacgtgtggagttcgaattgctgcccgatggaaaatggtatgtagtagattgttataccggctggtatggatatgatttgccgattgcagagctgaaacaaaccattcagcacgtgcaggaagagaatgcggcttttaaagaacttcacccttaaaagcaggaccggcagagagcatatcggtcattatctataagatatagcacataatttgaactattttgtacgatttgaacccctctttccaacaaaagaggggtttctttgcattcgggagatgaacaggtgatcttctctgtaaataccggctaatgataaaccgatttaccatcggacctaaaacgatatattctatgataaagcaatcttttactctgtcagtgacaatgctgatattgtcttttctctgtccggcattcctcaatgcgcagatagttacggatgagcggatgttctcttttgaagagccgcagttacctgcctgtataaccggtgttcagtctcagttaggcatatccggtgcacattataaagacgggaaacattcgttggaatggaccttcgaaccgaacgggagactggaactccggaaagacctgaagtttgaaaagaaggacccgacagggaaagacctgtatctttccgctttcatcgtatggatatacaatgagcagcctcaggacgctgctatcgagtttgaatttctgaaagacggccgtaagtgcgcttcttttcctttcggcatcaatttcaaaggttggcgtgcggcatgggtctgctatgaacgcgatatgcaaggcacgccggaagaaggaatgaacgagctccgcatcgtggctcccgatgcaaaaggacgccttttcatcgatcatctgatcactgcgacaaaggtggatgcccgccagcagacagccgatctgcaagtcccctttgtcaatgccggcactaccaatcactggctggtactctacaaacactccctgctgaaaccggacatcgaactgactcccgtaagcgacaagcagcggcaggaaatgaaactgctggaaaagcgtttccgtgacatgatctataccaaagggaaggtgacggagaaagaagccgaaaccatccgtaagaaatacgacctctatcagataacctataaggacgggcaagtgtccggagtgcccgttttcatggtgcgtgcttccgaagcctacgaacggatgattccggactgggacaaggatatgctgaccaagatgggaatagagatgcgtgcctattttgacttgatgaaacggattgccgtggcttacaataacagtgaggcaggatcaccgatccgcgaggagatgaggcggaaatttcttgcgatgtacgaccatatcaccgatcagggagtggcttacggtagttgctggggcaatattcatcattacggatatagcgtgcgcggactttatccggcttatttcctgatgaaagatgtattgcgggaagaaggaaaactgctagaagcggagcggacattgcgctggtatgccatcaccaacgaagtatatcccaagccggaaggcaacggaatcgacatggattctttcaatacacaaaccaccgggcgtatcgcaagcattctgatgatggaagacacgccggagaagctgcaatacttgaaatccttctcccgatggattgactacggctgccgtcctgcaccgggactggccggttctttcaaagtggacggaggagctttccatcaccgtaataactaccctgcctatgccgttggaggactggacggggcaacgaatatgatttatcttttcagtcggacaagccttgccgtttccgaattggcacaccggacggtcaaagatgtcctgcttgccatgcgtttctactgcaataaactgaactttcccttgtctatgtccgggcgccatcccgatggacaggggaaattagttcccatgcactatgcgatgatggcaattgccggaactcccgatggaaagggcgattttgataaagagatggcatccgcctacctgcgtctcgtatcttccgattcctcttctgcggaacaggcaccggaatatatgccgaaagtttcgaacgctcaggagcgtaagattgccaaacgactggtagagaacggttttcgtgccgaacccgatccgcagggtaatctctcgctaggctatggctgtgtatctgtgcaacggcgtgaaaactggtcggctgtggcacgcggacattcacgctacctttgggcagccgaacattatctgggacacaacctctatggacgttatctggcacatggaagtctccagatactgacagcacctccgggacagacagtgactcccgccaccagcggatggcagcaggaaggtttcgactggaaccgtattccgggagtgacttccatccatttcccgctggacctgctcaaagccaacgtgctgaatgtagatacattctccggaatggaagagatgctttattcggatgaagcctttgccggcggcctgtcacaaggaaagatgaatggtaacttcggaatgaaactgcacgaacacgataagtataacggaacgcatcgtgcgcgaaaatccttccatttcatcgatggaatgatcgtttgtctaggctcggatatcgagaatacaaacacggattatccaacggagacgaccatcttccaactggcggtgacagataaagaggcacatgactattggaagaataatgcgggtgaaggaaaagtatggatggatcatctgggtaccggatattatgtgccggttgctgcaagattcgagaaaaactttccgcaatactcccgtatgcaggatacaggcaaagaaacgaaaggagactgggtatcattgattatcgaccatgggaaagcaccgaaagcgggaagctacgaatatgccattctgccgggaaccgaccggaagacgatgactgcctttgcaaagaagcctgcctacagcgtattacagcaagaccggaatgcacatatccttgaatcgccttctgataagataacttcttatgtgctttttgaaactccccagtcactgcttcccggtggattattgcagcgtacggatacgtcctgcttagtgatggtccgtaaggaatctgctgataaagtattattgactgtagctcaaccggatttggcattgtatcgtggtccgagtgatgaggctttcgataaagacggaaaacgtatggagcgcagcatctattcccgcccgtggattgacaatgaaagcggtgagattcctgtgacggtgactctgaaaggcaggtggaaggtagtggagaccccttactgcaaggtggtatccgaggataaaaaacaaacggtgcttcgcttcctctgtaaggatggagccagctatgaggtagaactggagaaataatcttttgttctgtggcatgctatctgaataatcagatcccccaagagcatttacggccaaaggaatcggctgtaatagcagcaatgaaagctgaggagcctacatatcgctgcagtgatttgatagccgttttgctctcatgctctaacaaatggtctgtatccttttattcatcgtggtttttggtgtggtagcaactgtggtggcaggtatgagagcaaacggttgctctcactctgtctcatcctgatctgtctcatttatacaatgttatcttttgacttacaggatgttaatagctgatttctcaactgttaacgtttgatctctcagccattaataattgagaaatcagctattaatgactgagagatcatccattattgactaataaatgatttaatgcttcctaaaagaacagggcaattgaaacaactgatacggttgagttaatcggatcgggcggtcaaatcatccgaatcgagtatttctccagattgtttcatgccttgaaacctttagtttcaagtaatgaaaccaatggtttcaacctttgaaactaaaagtttcaagcgtctgaaactttttgaaacaaattgagactgactaataagtcaatagtatcattaattcccttcccgaaggaggagatttaagataccaccgactttttagtcggccttaaaatgatgtaggaacttaaattctgttgaatgatcttctgcaaattagaacatgaacatagcgactgctacaatacggttgttgctgacggagtgggtgtctatgattttaccatccgatttgtccagcttgccgtaccatgccgaactcaatgtatactcaactccgaacttccagtgaggaacgttgtaggtaagttcagctccggcagttaccagtttatcgaggttggttcctattccatagagtttttcagagactaattcgtcgcttgttcctaagtttttggcgtatcctacaaagattcccggtttccatttttgtccgtagactacattcagccaggaactggagaagcgtatcggagtgtactcctgttcttttgtcttgttgtctatgtgcttaattccaaatcctcccaaaccggatgcttgtgccaggttggaacctaatacgcttttggcgccgatgaaccaatttttattggtatattttacatgggcctcataagagagggtagtgatacgttcgtctactttgtacgtatatgggattgatatagtactattggtggtcggatcaagcgtcgtttcttcccatgaagattgagtacgtggctttaatgaaatcatttcaatgccggcacccgccagaaatcctccgtttttgtaatctgctccgacataaatctcagggatattgctcttctttatgtattcctgacttttaccggcaggtccttgtgacagatactgagactgccataccaatgctccggtcaactgaaggtgtttgttgttgaagcgataacgaatctgcggtgcacggctgaacggctggaacggtgctcctacggaaagattaagaatctgaggagaaacatcaccgaacaacggatgccatgtctgacctaccagcacagccgactttccccagtccagattaaagtatgcatggcgcagacgaatggtggagtaagaagttcccgacccgcggaagtccacttccactttggcggatgtcttggctgttcccaacttcgggcctgccacatccagtcccaaacgggaatataatgtatagaaattactgttcgatgtagcgttcaggtcttcaccattgccgtcgagcaattcatctttgggatacatgtagaacaatccgtctacagtttcctcgttggcacggctgttatagtagaagtccgtgcgaatctgtccgtagaatttgaatttaaaatcctttaattgtgcgaaactacttgatagtgtcatcaagcagagagataatagaatgtattttttcataatgtgcttgttaataaacgggcgcaaaattacataaaataactgattatcaatctaccgttgattaaaaaaggcaccgacagcctgataatatttgttgatattcgtacttttatgaatcgctttcagtacttttctgtcggtttggggcgccaggtattcccaaaaggtcttcattttagtcagtagctgtccctctcctccttccaatagcacgtcgtaattgttgtacacgcttttgtgcatggatttcagtctatccctcatttcatcgggcgcaagcgtacggttttctttgtattccagtgctaaggccggatttgccagtagtccacgtcctatcatgattcccgccagggaggggaattgtgcgctgatgcgttgaatatcttccaaattatgaatgtctccattgtagacaagcggaagtcggcagacctcccggaaagctgagaatccttgcaagtcaacttctcctttgtaaccttgtttgcccagacgggggtgcatggtgatctggtgcagaggcaggtcattcagtatgggggcgagtgccaggcattcatccggctgttcccatcccagtctcattttgacggagaagctgatctgcggatatcgggtgacaatgctgagcaatgctttcacctcttcgggataaggaagaatgccagagccgttatgacgtttcgccagaagcgggaacggacagcctaggtttatatccacttcctgatatcctttttcgatgaaaagggataaaatcacttctgctttctctgccgaagaggctatcaactgaggaatcaggtgggttaccccattgttctcgggttcgattccccggacatctctgcggcgaaagttccctttttccaatcgtacgaacggagtataataggtgtctacaccgccgaagaaggcgtcatgtgcattgcggtaaattgcttcggtgtaaccttgcagcggagcaaaatggatgggtagtgtatcttgcatatcttttaatttgctgcaaagatacggaaaagtaaaagagaggaacctcacggcccctctcttttgggtgttaaatcgattaaagtctgatttttatatacgtttttaactgaaggttagaaaaatcgtgcgggtgattggttgttatttaagggcgttgagccatccgggtacatagcccagacgttcccgcaattgtgcctcgtacaaagattcgggggataccttcataccggtactttcttcgtatgtgacttgttgctgctctttgccgggaaatttcacattcataccatgtgtaccgactacgataggcgggaaaatcttccaccatgtatcgctgtcgctccaccatgcgaagttagaagcgtgagagtctgttccggtcacattcagattccatagggtgaggtcgcccaagtgattggggacttcattttcatcgcctcctgcgcggtagtatacaagtccgccgctgcaattgtctatcagcgtggcacggggttgtgtggcgtgggattcgaaacaggcgtcattgccccaggttacgttccataatacggttcctacacttggcttcgatacgccgcagccgtggaactgcccttgacaactctttccgtatacgtcatttcctgcgctttcatcgcggactttgccgataaagacgcgtgaagaaccttgcgaacgtacggctgaatgtccgcgttttccactgatacggatatcgtatgccgagctgttggcagattcggcaaaagtaagcgcttcgctgacactctcgaagtggacgttgcgtacccatgaattgactacacgttgcagcagcagcggtttgtaggctccgtcgtattgccagcctactttagcctgttcggcgtgtccttctccgtgatgggcgtagccgtccaatgcgtttcctacgaagctcaggtcttctataccgacattctccagatatttgtacgtgcggatttcccatccttccgtatcgttatacttgatgtcgatgtcgtgcatgatcggttcgtagaaagtgatcttgccgtttgcggcggatttcacctgatgaaattcggtgatttttactccgtacaggtcgtcggagctttggttgatggagataggggcttttgctatcgcccagttctcgttgagggcaatcggaccgatttccttctttaccagttccctgtctccgctgcgcaagcgcaactgtacccactgtccggaggagattccggtggttccgctgactttcacggtaaagtctccgcgcttggcattctcggttacggaagcgagcttgggggagttaccggcattgttcggaccgttggtgtgcttgattgccaacagtataggtgatgaactgagattgctgatacttgtcggcagattaggcgtttccatgatcagacgtgtcttgtcgggaccgtcgcctttgattacaaagttaccgccatagatttcaatgccactgctgacattgttgtttttcgagtcaacggcgtccttctgcttgctttcgtcgcgggtgttgtcgtcatcgttgtgaagaacgtagtcgcctgcggggaaatagattacaatcttcgcgttggcgttcagcttgttggttccgtttactcttgtcatacctttctcttgcaggatgctgatcagcgctttacgggcggtcatgttcttggcggtcatgcgctcttttacgttgatcacttggtatcctaaagaaaatgcgccttgcggcgcactttctccatgattatatccggcatacgaatagtcgggcagcacattgttttctcctgtcttgaagtgttgccaagctattgccgagttggcatctatcttcgtggtcagcagttttaccggaagttttactacccggcagtaaccttctttcgagaatatcttgatgtaaatctgttcttcgtattctttcccttgcacgtttgttttgggggcggtgacgatcagtttgttttccgtcagtttcacgccccatgtctggttttcgatggtggctgtttccacgttggcttgttctaccacgaactcctgcttttgtcccagaccgaaagtggctgtgccttcatacttgattgtcaggtagaagtcttttccgtagatggggacttttacttggctgttgtcggcacggatggtaaaggtgatctgcccggtcgcttcgtcgatggtcacgttgctgaacagggaacttgcgttggcaacggcttgcgttccgtcggcaatctggttgttgcccagtttgttccaggtgcttccgttgtcaatagagatcagccagaaaccgtttgcatctactttcagtttcggggtgacgcctgctgttcccgcttcggggatggcgcttaccggtttgtcgttaacgagcagttcggtggtcatgtcgttgatggtatatgcccagtgacctgacgcgttgacgctgaacaaaggcatgtcgttcatgtctactttgccgctgtatatggttacagtttcgccgttactcagttcgatggtatagttgtcctgttcatccttgctatatcccaccaccagaatcttaccttcaaccatctgctgatagttgctgatgtccgagttcatctgttctatgctcgcttccagattggctacccgttctttcaggttgtcaatgtcggagcgcagatcatcccgttcgtcgcacgagtaaagtgcgacgaggagggtgatacatatgattgatattacttttttcatacgttagtcgatattagttggttgcaccgtattcggcatattctgcattcggaacgaagataccgttggcgaggtcgaaggtgccgccgtcgaacggattggatgttaatgctttcagttcttctgctccttcaaacggtagtttgcctccatagaacatttgccagttataggtcatagttttgtaaaggaggttatctgcgcaaatatctcctgttggggatgttatctgaggacgaatgatgactacattacctgttccgtctgtatttgtccagaagatattatttttaatagaggttttcgccagattgcctatgtttacgtagccaccggtatttgtttccaagtttataaatgtattgttttctatggtcagattggctatacctgaagctgaaccattgaataaaaccaattgatttactttacctgacggacaatagaatgtgttgtttctaaagatgacattgccataatcctgattcttattactgctggtattgataataaactgttgtgtaacagctgttatcttgattgtactattttccatgctgaaattggcaatactccttttgtcgttagtaatggcacttacaggtttgccattgagtgcaatctgacattgatcaaaagctacattagcaaatgactcgtctgcataaacagtaaacagataattagtgaatccttcggctgctttaaatacaatgtttttacacaagaaatgtccagtttcggtattttgtctgagtctgatataatttcctgtaattgccactgtactgatgttttgtgaatcatctccgatgaaaagcaaattagcggcatttgtggtgctgttatagttgactgtaactcctcctttgataaaatagatgcctggagtagtgattgtctgatcagtatcaatgtatgttgcattctcgaatttagtattatttacttcaattccatttaccgtaaatgtggctccgctattatataaagcatagtagctgtcaactacctctacagccttcacctgaatcttggcaaccgcccaactggcacccttattaacctgcactgttacgtcggaaccgttatccgccgttgcacgtgtactcattgcgtttgccggagctgtaatgctcaatgtagctacattggtcgtttcatccgcttcgctcacagtagccacccatccggcaggagcagtaacgataatgttttcaccttttacttttacagccgtagtggcagtcttgccatagcctatttcccagtatccgttcttcattccggtttccggttcggtgatttcgcaaagcaagtcttttacgatagggatagagatagcttccgtctgtcctttcagtttgacaacgaagaattccccggttgaatctacgtatacttcctcaaagaaagagtctgcactgcttcctccggaaccatcgctgactgcggataccttttgaccgtctgtgtcgagtacgtcttcccagctggttccgttatcataacttacctgccagaaacttccctcgtccgtaatccggaacttgggagctataccatccttaccgggagtgcccacagcctgaacaggtatgccattctgcatcaatacctcaccgttcactacccattggccctcgtcattgacagtaatctctggataagcaacttctcccttcgagccttgtgtcagtgagatggtttctccgttactcagtttcagtttatatgtaccgtctgtattcgtcacttctgtgatagtctgaccaccttcaagcagtcgcttgatagctgtcatgttatcgttcaatagactgacttgtgcttccaaagactctacgcggtctttcagattgtcaacatcgtctctcaagtcgtctgtatcgcacgctgccaatgcaaacagcgcaaatgcggttaacatgattgatttaaagtaattcatagatataatgtattagttattattttattcgtttatttttattccactacgtttaccaccatgtggtaagtagtcgtggaggaatgatcgatattggcattacgagcgaggaatgtcacgttgtagataccaatttgattgtaggtatatgtgtacttatccagacgctgggtaatatcctttactttcgttccctgatcggggctgcaagagttaacggtaatcagatcggaaaccagccagctgtatttcagcggatcgttggcattggtactatggatgaagaaggagccgccgcctacacctgtcaggttccagataccggatacgttattggtaactgtcccgtattcacggtctttggtcatgctggtctgatccttcagattccatttgttcttcatattgatcggagtaaagccgaaagaaccggcagaatattctgcttcctgtccgctcgtcatcacattattgatgcgcatccgctcaaagtacatcttggattgtgccactgtattgtcaatgccacggtagcagatagcgattgcaatccgtttgcccatgtattctttcatatcaaaactgtatggagtggcaagatcggcattgcctaccgccgctgtcgggaatgcggactgcggaaccagttctttccatttaccgtctttctcaaattgctctacaagcaaagagtcagcttcgaaattatccttgtataatccggtgaattcatcggagatatatacgtgtttctccaatgtcgtgctcgggttaccgtactggaaccagatagagaagttcagcatagacgacttgatctgtgaaggatcaattgtttcgcgttcgcgatattcgtatttgctgcccgcttctccactgaagaatgtcaggaagtccggatcgcccgaaaggatgaactctatcggagtaccttttttggcagtaatgatctgtccgtcgaagcttacattctcgttggtcgctacttttacgtgcagacctaccgcttcgtccagcccgtcgctgcaagccccgaagaagagacttgctacacagatggctatgagtttatatgttttcataatctatgatacttttatcgatgaatactgtgattaccaacccggattgttctgtgtgatatctttgttcacactcatttccgcatccggaatcgggaagtagttgtaggtgctggagatgttgaagtaggtatatacgttggtaggtccctgcgtccagttgttgccggattgtgcttcggttaccaatgctctcatatttttcacatactcaccccagcggatcaggtcgaaacggcgggtgtattcgaaacaaagttccatggcacgttcgtctttcacggtctggcggaattcttcctgcgtcatgtcgggaagctcgttcagtccggcacgttctcttacttccttcatacattggtaagccagagtggtagggccgttgttcgcttcgttttccgcttctgcgatcatcagcagtacgtcagcatagcgcaggatcgggaagttgatagacgtatagttcttgtctttcttatccgcttcgtattcacggcggtatttgccgcacatacggctgaagttcttggtggctgtggtcttttctgtgtcatctgcgtactggtaagttccgcgttgctgaccgtattgggacattacttcagcaagtttgccctgctcaaattcacggtgggtaacgcctgtattcttgcctccggcttctttgtattcaaacggagcgatactccagttgaaacgtttggtatcaccgttgttcacataaaggttgtacagtttcggagtgctgtagataaaggcatagccatatccggggtctttggctcccgtcacatcgcttttggaggacagatccggaccggcgagtccgatgatgttaccgatacggccttcggcttgtgtatccgaagtgttgttgccggcaaattcggcttcccagatgctttcgttggcagtggtgttatacttgtcggaacacatatcgatgaaaggatcccagtagttggcagctagtttgtgaccggcagtcattactttctgggcatagaagctggctctttcgaaatagtctttcttttcggcctgtgtggcattgcgaccttcacggtaatgctcgcctgcacggaacagatatacacgtgccagtatgccccatgcggtagactgagagatacgtcccggcttgtaagcaagatcggaggccgatttcagaccagtatcggcggcatctgccatttcggagatgatgaagtcatagatttcctgcttgtccgtacgcgggatattcaggttggtaacgctttgggttgaaactgttttgaaaggaacatctccccagcactctaccagattgaaataatagaatgcacgcaggaagcgggcttcggcgatgtactgttctttgacgcctgcatcgaaaccgtttactttgtcgatgttttcgaggaacatattggcacggttgatgcctgaatagagggcataccagaaggcagtcacggcgttgtcactggtggtggcgttgttgcagatcagtccggtagatgcgggaccgcgtccgctgcctccgtagtgggataagtcgtcaccggctacgaggtacatatagtcaccgccgtagaaagtaggttgcgacagtatggcgtagatgcctgtcaggaaggagttggcttcagcgggggtgttgaagtagttctccggcgtcagtttggtaggttctttgtccagaaagtcacaggatgccatgctgaaacctgccaatagagctatgattgttatttttaatgctttcataatcgaattcttttttctaactgttactatcattatccgtttagaatcccaggcttacaccgaagctgatagagtatgctctcggataggaagagtagtccagaccgggagtgagcgcactgttgcgtacagatacttccggatcataaccggaataaccggtacatgtccacaggttttgtgcggcaacgtaaacacgtgctttgtctatcttccatttcttcaccagcttggcggggaaggtatagcctactgttacgttcttcagacgcaggtacgaaccgtcttcgatgatgcgtgaagagatcacacggttggaagaggagttggtagccgcagggatgtcactggtcggattttccggtgtccagcggttggcatagctggcgaactggttcaattcgcgtgaacggttgttggagctttcaaagaacaggcggttggcattcatgatatcgttgccgtatgaccactggaagaagacgctcagatcgatgcctttatattcaaagttgttggtgaaaccaccggtatgtatcggaagtccgcgtccgataatcgtacggtcgttggagtcaactactccgtctccgttaaggtcggcatatttgggcatacccggctgagtgttggtctcagtagagtagtggggcactcccggtttcaggctgtatgagttacccgatttgttgaagtcgtcgtacttgtatgtaccttcatagacataaccatacatcagtcccatcggcagaccgactttggcgatgtagctggactgaccgttgtagttctggtcgaattgcgcggcagtcagcaaggctgtctgattctccgacaatgccagtactttattcttattgaatgaaatgttgaagttagtcgtccacttgaaggcgcgtgtctggaagttgacggtgttcagactaagttccagaccatcgttacgtactttaccgatattcttggtagcgctgtaataacccgaagaaaaaggcagggaagcgtccagcaacaggtcgcgggtggtcttccggtaaatatccatcgttataccgatgcgttcgtcgaagaatccgaggtcgagacctgcgttccattgttcggttgtttcccatttcaaatccttgttgggcagagaagtaggaacaacacctgcattcgtcgcatcattgtcgaatggatagacgccgcttgggagggagtttgtcgatgtatacgaaccgactcttgatttcaataccgccagcagcgcataataatcatattcgccgatacggttgttacccgtgagtccccagctcagacgaaccttaccgctggacagtacacttttcaacggcttcataaattcttcttccgagaagctccatgcgagagaaccggaagggaagtatccgtaacggttgtccttgttgaacttggaagaaccgtcggcacggaaagaaacggtagcgtaatatttggacatataattgtaagtcacacgtccgaggtacgacaacattgcccatgaagactttgccgaagtggtagtacctgcctgtccttcgctcatgcctgccataccgagtgattcgttggggatgtgcgttgtgcggaatgaataaatctcatagtccgagttctggaacgtgatacctcccaatacattgaggaagtgtttctttttgatgttagtctgataagtcagggtgttttcgttcagccatgtcaggcgttcctggcgggttacctgagcattcactttatctgtagaggtaggacctccgtagcgggtattcgagttgttgaactgatcctgcttgcgtgaatcataagtatatccggcggaaactttcagtttcagtcctttcagtacttcgtattctgcgaatccgttcatttgaagattgttggtgtagctcttccggtattcgttcttctgtgatttgatcgggttgaaacggtagtcgttgcttgaatctacggcattgtccgttgaactgtccatcaggaagctgagcggagtgtcgggggaagtcaccggacggtatccccatacgctatagaaaaggttgttcataccactgtaagaggtggatgatggagtactacctgtttggatagagcgtgaatagttggtggtcaggctcatgttcagtttgccgcgacggactactgtgttcatacgtccttgcatacgtttgtaaccggtttctatcagcgtaccgtcctgatcgaagtaagataaggaagcattgtagcgtacaccttccgtaccaccggcaagtctgaccgtatgattctgctgccaggcagtcttgaatatctcgtcctgccagttatattgcggtatgtctttataatcgtccagtgtccattgcttgccttcgtagttcatcaggtatgagccggcaacgacggtaggatacatttcattctgtagcttgacaaactcataagcatccatcatcggaatagtgcgggtgacgtgctgcacaccgaaactaccgtcataggacaactgtgcccgtcctaccttacctttcttggtggtgatgatgacaacaccgttggcaccgcgcgcaccgtaaatggccgtagccgacgcatctttgaggaagtcgagcgactcgatatcggaagggttcagcgtgctggctgccgatgaatcttctatcgggaaaccgtcgataacgaacagcggcgagttttcttgtgtcagtgagttgttaccacggatcacgatgctcatgttgccgcccggcataccttcgcccgaagttacgtttactccggcgatacgtccgccgagtgcctggtcgaatgaagcgacgggagcggtaagtacatccgccatgttggctttcgccacggaacctgtaaggtcgcggcggcgtacttcctgatagccgacaaccactacttcgtccagtgttttagtatcttcttttaatgtgatgaccattggtttttgcgagtccgccttttgttctacggtgacgtagccgataaaggaaataaccaaggtagcgttcttttgggggatgttaagagtgaatttaccgtcaaggtcggtgatcgttccctgcgaagtgccttttacctgaacactggctccgggaacaccttctcctagattatccttcacagtacctttgacaagtacttgtgcaagcacaaatggaacagaaagcaggagcattcccaaaatggagagcatcctttttcttgtctggttggatagatgttttttcatatattaaaaattaagtgattttgttgaatttacgatggcaaagatatacgcattgattgttctcatatggatagaattattcaagattgatacaaaataatacaaatctgctattctcattggttatcttgtctttaccgattcaagcagttcggacagctctctgacaacttccggatgctgtttcgctacattgtttttctccgatggatcggcggataaatcgtacagctggggatgcctgtcattgcccagttccatttttgtccagtattcgatggcgggggcgtcactcggttcgatgtacttccattgtcctttcacgatggcgagcgtattattgagattttgctgtacgatgtattcacgactggtgtagtcttttcccagaagcgtgttcagatgttcctgactgtcaggagctgcgccttccggaagcggttgtttcagtaaagcggcaagtgaggcaaagatatcgatttgtgagaagagagcctgttgcttgttcggcttcactttggcaggccagcggacgatgaacggaatgcgggttccggcttcgtaagcgctgtactttccaccacggtaaatacccatcggggtatgtccgttgaggcgttcaaaggcttggtcctggtagccgtcgtcgatgacggggccattgtcgctggtgaatatcaggatggtgttgtccgtcagctggaggctgtcgagggtgttcatgatctctccgatggtccagtcgagttgcaggattacgtctccgcgggttcccagaccgcttttcccggcgaagcggggatgtgggacgcgcggtacgtgtacgtcctgcgtacccatatataagaagaaaggttcttccttatgggaggcgatgaagttttttgctttattggtgatgatgtcggcgatgtcctcgtctttccagagagcggacttacctccggtcatccagccgatgcgggggatgccgttgattatcgtattgttatgtccctgactgggttttagttttacgagctccgggttctcttcgcctgtaggccagtcgcctactttatgctcgtagttcacagtgatcgggtcgttcgggtcgagtcctaccacgtgtccgttctcgacgaatacacaggggacacggtctacggttgccggaatcacgaactcgtagtcgaagccgatactttgggcgttgggggtgatgtgcccgttgaagtcggtgcctcccttcggaccgagtccaagatgccatttgccgacaactccggtggcgtaacctgcttctttcagcatatcggccatggtgacgcaggcggtgtcgatgattagttccgagtttccgggggcgatgcctgtgttctcctgtcgccacgggtacatacctgtcaggagtccgaagcgggaaggggtactggtggcggaagttgcataggcgttggtgaactgtacaccctgtccggcaaggcggtcgatatggggagtactgaccttcgttgctccatagcagctaaggtcacctatgccaaggtcgtccgcgaatatataaataatgttaggcttttgtgagttttgtccgttgtctttttgtactttctgattgcatccggtcagcagggctataccgggcaatagcggtagtaaacgtgagacattcttcataatgttggtcttttatggagtgattactgaacacaaagataagaggattggcggaaatgagtgagcaggaatgtacaggtgtgatacaaaatagtccattctaaagggttaaatgtttcggggctacggatgccttttcctgacatcgtagcccggatcttgtgccacgctgttggcacagctgtgccactgcgatggcacggtcgtgccagcagcgtggcacaagtgtgccaacaggagggaactactttggcataggttctcctgttacaaatgctacttgcttacctgtttatgggttattgatccgtttcttcgttcccttcttcctctttttcttcacccttgcggtaggcaagcggactgacgtggtaaatctccttaaagcatttactgaaatagcgggaagaagagaaaccgatgcggtcggaaatctccgtaatgttcagctccggattgttccgcagcatgacggctcctttcttgagacggatacttaatataaagtcgttcggtgtctgaccggtgacggctttcagcttcgtgaacagattggtacgtgccatccccatttcacgggcgaagatgttgacattaaagtccgtattatccaagtgctgttcgatgatggccatggcacggtccagcatttctttatccatcgggttggtagcaagcatctgggcaaaagcctgtggctgtttgctgaatttctcctgtagcaaccgccgtgagttcaccagattgttgcaacgggagatcaggagattggtattgaacggcttggtgatataatcgtccgcgccgatctttaatccttcaatgttgtgttccacggctgtacgtgccgtcagtagtactaccgggatgtgacaggtgttgaagtccgttttgatttgcttacagagttccgtacccgacatacgtggcatgacaacgtcactcagtatgatgcttggcatatctttttgtatgatatccaatgcctctacaccatcggaagcggtggtgacctgatagaatgtttcgaagatacctaccagcatttgcttgatggattcgttgtcttccactatcagcattttcgcatcttcgatgcgtttgttgtcttcctccttccattcggaatcgggcagtatttctacggttggaacgattgtttccggttgttgctgaatgttggtgtcggtgttgtcccgtatgatttgttcctcagtaaagtgctggttgcccgatttcaacgtaatgataaaacggcttcccttgcccggttcgctctctacacggatggttccgtgatgaagttcgatgataccttttgtcaacgccagtccgatgcctgtgccggctccggtattcagcgagtcgaggcgttcggtctggtagaaacggtcgaatatcttgtcgatctcggcggcggcaatgcctgttcccgtgtctttgatctcgataatgacgtatttatcctcctgcgatacgttgatggagatggtatcttccgctttcgtatgcttcaatgcgttggacagcagattgttcactaccttctgcatctgcttctggtcgtaccatacttcaatatcatccgactgcttgttgaacttgaaattgatttgcttgctgctggcgtattcaaggaataacagataattctcgtacaggaagttcaccagattatgtcggctgactttgattttcatgtgcccttgttcctgcttgcggaagtcgagcagttccgtaattagttcacgcagttggaggctgtttttgtaaattcccaatatcttgtgataaatattaggtgtgaatgtctgtacttgcaacagcgtttctacctgtcccacgatcaacgtcagcggagtgcggaattcgtgggagatgttggtaaagaagcgcagcttggattggtttaatgcttcgaggtcttcgatgtgcttcttttcatatttcagtgactcacgcagtttgatgcgggaattgtagttctgaatgagataccataacagactgacggtacaaatggtgtaaatcagataagcccaccatgtctcataccaaggcggtaatacacggatcagtagtcgggcttcttcgataccgtctccgtccgacttgatgacgagcgtatatttgcccggattcaggttggtataagtgataagcgtctgtttgcggtcggtgtgattccattcgtcggagaaaccttcgaggcggtagacgatttcattcctgttggcagggatgaagttggaagtggcgtattctatgctgaacatggattggtcggctttcaggctgatttccggtgtataggcgatggactgttccaagatgccggtgtcgtctccggcagtgatctcctttccgttgaccagcaggcgggaaaggatgatgctgtaggacttgggcgtaaagtgcagtttcttttcccagaaagaaatcatgccttggatgccgcctagaaatacttctccgtcatgcgttacgaacaatgcgttttcgttgacggcagtcagcgggaatccgttctctgtaccgtagttgtaaaacttcttttgcggatagtcaaactgggagaatccctgattggtaatcagcagcaagtctcccttttgtatggacgactcgaatacttcgtagatacagtcgctggatagtccgtctttctgcatatcgaagttttcgaagtcgttgctctccttgcggtaacggtcgagcccgcttccggaagtggagaaccacaggttgccgttgctgtcttgcatgatgttgttgacattgttgttgctgagagtgttcggaatggagggattgtgtgcatagtgggtgagcttgccggtgtcgaagcggtaagaatatacgccctctccggtagcggaaacccatagcgtttcgtccttgtcgatgtagaggctggccaccataccgatatttctgccttctttggtatccttgaaaagatgttcgcaggtgcctgttgccggattgaaaaggcagactccgttttgtgtggcgatgatcagtttgtcttcgtagggcacgatgtcgcgtacaatgtccgagggcagtgtggtcgggtcgcccgctttcatccggtaaacggtaaagcggttggtgcgcaggtcgagtttgttcagtcctcccaagtgtgtgccgatccacataatctcctctgtccggtcgtaatagattgccttgacgttgttgtgcgagatactgtttctgccttcttcatggcggtaccagcgataagtattgtttttccggttgtagacgttcacgccaccgccttcggtgcagatccataagttaccgtctttgtcttccgtcattctgccgacgatgggactgcttaatccttctttctccgtgtctcccactttatagcgggtatagatttcatattccggattgaagtagttgacgccgccaaagtaagttcccagccatagggttccctgttcgtctttcacgatacaccagatggaagagtgggtgagtccgtcgggtttgttgtcattggcggtataaagttggaactgtcctgtgcttttgtcgtagcggttcaagccgtggaaagttccgatccatagatttcccagattatcttcacagcagcttctgacaaaatcggaacatatactgttcggattcttcgggtcgtggcggaagttgtcgatagtgccgtttgtgcggatacggtagagcccttcctcccagctgccaatccacagttctttggatgagtcttcgtagatgctggctatgtttcctttcgtgatgggctgagagagttgcttgtcgtccgacaggcagtaaacaccattgctggtggttcccatccacaggtttttcttctcgtccagatggaggcaggataggttaatgtctttcccggcaaggtggtagtaaaggtcgaagttgttcgtgttctcgttaaaaacgaatacttcttctctttttccgatatatagtttttcgttgtagtagatagcgtccacattgccttgcagtagggttttgaatcgttgagtggtcatgtcaaattcggctacaccgtcggtgcaaagcaggtaaaccttcccgttcttattacctgtgatacggagtacggtattgctgaacagactgttcggatcattcttcttgagcttgaaacttttgatatcgttaccgttataacggttcagtccttcgcgcgtacctatccatataatgccccgttcgtcaatgtacaggctgttgacggaaaactgggaaagtccgtcatctgtggtcaaatggctgaaagtaatattttgtcctaacgtacggacagcagttacgcttaaaaatagcagaaataaaaggattgtttttctcactaattcggttgtttagggtattactaatggcaaatatattgtttttatttgattttcgggaaccttattaggagaaagtaactatatttgtatcctccaaacgaaagatatatgaaagtaaagaaaattagttctgctaatgtagaggcttgttcgcttcctaaattatttgatgaggaaaagatagatttccagccggttcagtgtgtcaactgggctgaatatccttacaagccaaaagtaagtttccggattgcgcataccaaagattctattctgttgcacttcaaagtcagagaagaaagtgtacgtgccaagtatggagaagacaatggatctgtatggactgattcctgtgtggagtttttctctgttccggccagtgacggaatctattataatatagaatgtaactgcatcggaacgattctgatcggtgccggaccagcccgtaacggtcgggaacacgctccgaaagaagtgacggctctcgtgcagcgttggtccagtctgggcaatgaacccttcgaagaacgtgtggacgatacgacttgggaagtagccttgattattccttatgctgcattcttcaagcatcagatacagtcactggatggaaaggaagttaaagcgaatttctataaatgcggggatgaactgcaaacccctcacttcctgtcatggaatccgataaagattgagaaaccggacttccatcgtcccgacttcttcggtacgctggagtttgaataaataagaagggtgatgtccgtaaaaagacatcaccctttctctatgaaaagtgtattttgtctatttcacaatcccacgttccgaaccttttacgaaattcacgatattctcgatttcttcactcatcggaacctgatcgataatcttctggacagcatcctgaacactgaaattaccttgatagatcaaccggtaagcattggcaatatgacgaaggattctttccgacgtattgtgatgctgtgacagaacgactgcattcactccatgataggcaacaggattaccggacataattacgtagggaggaacatctttggagatgcggcatccgctttgtacaagtgtccagctaccaatgtgacaatattggtgcaacgttacgttgccgcttaggatcacacaattatctaatgagcattctcctgcaattgtagtacctattcctaccacacaattattgctgatctgcacatcatggcaaaggtgtaccttatccatcaggtagttcccgtttccaattctggtagcatttcctgcaaaagtggcacggctgattactacattctcacggatatcgttattgtctccgatgatcagactgctttcttcccctgtatagtgaaagtcttgcggttctgctcccaggacagcattctgatgtattttgtttcctttccccatttttgtacctttcaggatactggcgtatgacatgatggtacagtcatcgccgatttccacatctttctcgatgtaggcgaaaggcaagacagttacattcttgcctaatttcgcttcggggtctacgtaagctaacggactaatcataatagtatatgtttaaagttaatcttctcttccaccgcctaatgcctggtagaggctgaccacagcctgcatcttgtcgaaacagtcggaaacctgagaaatctgtgcgctcagataagattgctgtgccgacaatacttccagataggttgacgtccctaagttaaacaattcttttgtatcttccgaagctttcttggcagattctacctgcatttggcgggattcagcctttttactggtgttttggtataaacttagcgcattgctgacttcgcttccggcattgtacaacgtttgctggaaagataatttagcttgttcttcctgtgctttcgctgctttcaggcgggcaatattcgtaccacggtagaacaatggctgagtcagtgaaccgatagcggaagccagtaacttacccggattgataatggcggaacctgcactgttcgtccatccggcagaaccgctgagagtgatctgcggatagaaagcggcacgggcagagttcgtattataatagcagcttgccaaggacatttcggctgcttttacgtccggacggttagataacaactgcaaaggaatccctgcggaaagttcctcaggaagtgcctgtgcttccagtacaccacgtttgatcgcgtgcggagcttctcccaggaaggtagacagggcattttccgtttcgcggatgctctgctcgatgtcggggatggaagccactacttgtgcataggcagctttgctttgtgctaaagcggcagatgtgtaggtcgatctttccgaaagtgcctgtacggtttcagcattacgtttcagtacctcagccgtagcctgagtgatctccagctggcggtcgagcataagcaaggtataatacatgttggcaatgttggcaataacttgtgtctgtacagcctggcgataagcctttgtctgtttcagggtgacttgtgcatttcgtttggagttcagcagttgcccgaacaggtctacttgccaactggcagtaaccggcaatgagtacgttttagttgctgcgttcttgtcaaaactgctgattgttccctgtggagacaaaccgatggacggtgcataagccagtcgggctgacatcagagacgcttctgccgctttgacgttcaatgcagcggaaaggaggtcagtgttttgtttcagtccctgttcgatgagagactggagctgtgggtcggtgaagacttctctccacggcaggttaccgaagttggtggtatccgaagctaatgtatcattgtccgctgccggatcacgatacaggccggaagcggtaatatcttcgggtctgtcatacgacttatagatgtggcagctgctcaggagagcagttgcacacaccatatatagaatctgtttcttcatatcgaatttcattatttagcgtattgttcaatctcagttacggcatccgtattgtcgatgtcttcccattccatcggtttaaccttctcttgcaggtactggaagataacgaacaaagcaggaacgatgaagatctggcagatcataccgatcaacataccaccaatagaagctgttcccagtgtacggttaccgtgggcacctacaccgaatgcgaacatcaacggaagcagaccgactaccatagccaatgaggtcatcaggatcgggcggagacgggcaccggcacccagaacggctgcccatgtgatgctcatacccatcttacgacggtcgagggcaaactctacaatcaggatcgcgttctttgccaacagacccatcaacatgatcaacgcaatctgcatatagatattgttggacatggtaccgagtatcattttcaaggccgatatactaccgatcgcgctcattccgttgacgaacaggaagctgcctagcaaaccgaacggaatggataacaatacggccagcggaagaatataactttcgtactgagcactcaacagcaaataaacgaatacgaaacaaaggataaagatcaaaccagtcgtactgccgctactttgtgcttcctcacgagccatacctcctagttcataagtgtaacctgccggaaggttttctttggccacttctgccagtgcagccagtgcctgaccggaagtataaccggaagccggagctaccatcaccttcatggaagtatacaagttgaaacggctgataatatcaggtccgtataccttctctacagagatgaactgggaaatcggagccatttcgccttggttgttacgaaccttgacattattcagtgattccagattcttgcgtgataacgggtccgactgaatcattacgcggtacatcttaccgaaacggttgaagttggatgcgtacaaacctccgtaatatccctgcatcgtgctaagaatatcgcttgggctgatacctgccttcttacaagctgccgcatcaatatcaatcatatattgcgggaagttcgggttgaaggtcgtttttgcagagttaatttccggacgcgcctccaatgctgcggtgtagttgttggctacatcaaagaatttgttcaggtcaccacctgtcttgtcctgcatgttcacctcgatatccgtagatgccgagtaaccggggatcataggaggagcgaagaacaatacctgtgcttccttgataatcttctgcgcacgcatgtataaagaaccgacgataacgtctgagttctgaatcatggagcgttcatcccagtctttcagtttgataatgaaagaaccgtaagacggtccctgaccaccaatgaaactgaaaccggagatcaatgtacgtgaagctacggcagggtccgcagcaatcagactgtctacacgtgccagtatttgttccgagcggtcttgtgatgtacccggaggtagtgttacagctcccatcagcgtaccggtatcttcattagggaccatacctgtcggagtagtgttcataaagaagatcagcaatacgatagagagaaccaccagtcccattgacaaccactttttctggataaagaagagtacgcgtttcttatacctctttaatatagagtcataagcggcattgaaagaagtgtggaagcgagaaacaagtgtttgtttcttatctccatgatcagtatgcggtttcagaagaacggcacacaatgccggactcagtgtcaaggcgttcaatgcggacagaccgatagcgatagccattgtcaaaccgaattggcgatagaacgtacctgccgtaccacccatgaaacttaccggaataaacacggacatcatgaccagtgtgatagatacgatggcaccacccaattcgttcatcgcatcgatagatgccagacgggcggatgtatatccctgatcgagcttggcatgtacaccctcaacaaccacaatcgcatcatcgaccacaatcgcaatggcaagcacaagggcacacagggtcagcaagttcaaactgaatccgatcagtgacagtacgaagaatgtaccgataagggctaccggaatagcaatggtcggaatcaaggtagaacgcaaatcctgcaagaagatatatactacgataaataccagaataaatgcctcgatcaatgtcttcaacacttcgtggatagaagcgaacaagaagtcgttggcgttcatagaaacgttaatcttcaatcccgaaggcagtgttgtggatgcttcatccaataatttctggatatcagtgatggtttgcgtagcatttgtaccagccatctgataaacgatacaggttacagctttgtgtccgtttacacggttggtaaagttatatcccagacggtccagctgaatctccgcaatatcattcagtcgaagtacctcaccgttaggcagagacttgatgacaatgttctcaaactcttccggctgttgcagacgtcctttgtaacgaatggtatattggaaagtctggttactacgttcaccgaattgtcccggagccgcttctatattctgttcagccaaagcggtagatacgtcgttggggatcagtttatactgagccattacgtccggtctcagccagatacgcatggagtagtcctgacccatcacactggcatcacctacaccctgtacacgttgaacctgaggaatcaggttgatttttgcatagttctcgatgaaagcatctgtatatgtatcggtttcatcgtaaagagagaatactaccagcatggatgtctgacgtttctgagtagtcacaccaattctggtaacttcggcaggtagcaaaccttgtgccatggaaacacggttctgtacgttaacggcagccatatccggatcagttccttgtttgaagtagatcgagatatcaccggaaccggtattggatgcgttggaagtcatgtacatcatgttttctacaccgttgatctgctcttccagaggggcaattacagagttcaatacggtcgatgcactggcacccgtatatgtggctcttaccgatacggtaggaggcgcaatgtccggatactgtgtgataggcagtgttgccaatccgatagcacctaggataactatcaaaatggaaataactgttgatagtaccggacggttaatgaatttatctaatttcatacgattatctaaattattagttgaaagctgtagctaaatttccgtcgtgctggtctttcaaatgctgttgatagttcgcttctttttgagccggcgtgattggttgtattttttggccgtccttcaggctctgtacaccttcgactacgattttatcgccggggttcagtccggaagttaccagatattcttttccgttgtccaggttgaatataccgatctcggtatatttcaccgtgttgtccggctgcagaacgtaaacgaactttttgtcctggatttctacagtagccgattgtgggatgctgataacgttctccatattataagggatcagaacgttggcagttccaccactacgaagcatatgttccttgttagggaagatagcacgcatgctaacagaaccggttgactggtcgatcactcctgtgatagcgtctacctttccttctgcatcatatgttgtgccgtcaatcaattgtagtttgatggctggtattttactgatttcttctttgatggttcctccggttttggtcatagccagcagttctttttcagttgtagagaagtatacatatacttcatctatttcagatactgtagtcattggcgtagccatagaggggcttacgagtgctcccaaacgataaggaatgtcgttgataacgccgtctgaaggactctttacttgtgtgaaagagtaattttgttgtgctgtggtcagctgtgctttagcctgggcgagttgtgcctgagcctgtgccagtgagttcttcgccattgacaagtcataatcgctgataatctgtttcttgttcagttcgatcttattgtcaacagtcatttgttgtgtattcacggctgcttctgctgttgcaactgaagcttttgctgtgcgtactgctgcttcatactgagtagggtctatgatgaataagagctgtcctttgcgaacggttgctccttcatctacacataactttgtgatgaatcccgatacctgcgggcggatttctacgtcttgtctacctttgatagtagccggataagctttcattagatctgcagttgtcttctgtaattcttgtactgcatattctgggactttccctgtgtcattgcccttattgccgcaactagacaagagggctaagcaaaatgcaaaaaaaacaattctacttttcatactttatatttatctgttttttaaaattgtgcgttcgtcgctgtgtacattcattgtatggatagatgatctaaggaagaaaagccggaaacttattctatgaaataagtttccggctgcaaaagtactttaaattcggtattcttgtactctgataccgtgttttttaactatgttttttacttcagtttatgatatacaggattcattatgaaactgaactcataatcctgatatggaagacggtatttttccaaagcgatagcaccccagctgtttacgcaggcgagtcccgtttgtgccttatcaatacagaagtttgtgaagttggctttttctacttccggtgagtgacgctggtctttgccggcaccgtcatccaatgattcgattgtataattcagtgcggaagcggagaacggtgcatcggctacaaactgcagtccgttgccgccgatattaagcagtctccaccagcggatatcagttttggtaccggtttcctgcgggcggatgtatggatagaattgttcttctacggtctggcggtacttgccgatccttgcggcgtggttacggtcagaatagttttcacccggtccgcgtccgtaatattcaatctcattgaaggtgacaggcatacgcagctgcattccgaaacggaacatgtcggaaaccttcttgctcttgtctgcttccatcttttgagttacttttactgctcccttattattgatggcatacgtcaggtacagctttccaccaatagatttcatgtcatattctgcacgaaccactgcttgttcgttttctatatcatgcttcaatgaagtcagttttagttccggattcttccatgcggcatatctgtgttgtaatcctgctccaaagtcgttgtcggtcggagcacgccagaagttgggagtcagtgcacttccgtcttccatcagttgcgttccgctgacgtcgtagcggcagaggtaaccgttgtgcttgttgaattcgagtgtgaagtcttcgccggaaacaatcagatagttgcggtcgttatcgtggaaagagggaactacgactgcgatattggaggactgcttgttttccagttttagttccggtgccttgtagtcacggatactcatttggtcataagcgatggtttctcccgcaggaagcaatgtctcggcagcttttagcttgtaactgacattcagaagcagttccttgcaagaacagatgttctttatgtcgaatgggagttgaagttttgcagtctgttgcggggctacattcaggtctgatacgatgccgttttgtacgatttccccgttagccagtaactgccattccagatagaatgcagacaagtcacggaagaagttctcgttatagatattgatctcacctttggaaagatcggccggagtagtccagatattctgatagaaatatcctacttcgtaagcgtgcgggtttggtacgcggtcggggctgatcaagccgttgtcattgaagttattgtccgaagcgtcatatttgttaaagtcgcctccatagccgtagatggctacaccgtctttatttttccaatggcaggactggtcgacaaagtcccagataaatccaccttgatatttcgggtacttgcgggtgatgtcccagtactccttgaatccaccttgtgagttgcccatagcgtgtgcatattcgcattggataaggggtttgtcaatgttgccttcacaatatttgatacagttattgtaatcataatacatcgggcagaaaatgtcggtgaattcgctggttcccgcttgttcatattgtacggcacgtgttttgtcttcgttcttgatccatgtatagcaatgttcgaagttaggtcccataccggcttcgttacccaatgaccagaagatgatggacggatggttgtaaccacgttgtacattgcgttgattacgttccatatgtgctttggcgtaaatggggtttttggcaaggctcttgtctccatatcccattccgtgggattcgacattggcttcggctactacgtataaaccatattggtcgcaaagatcataccagcggttgtcgtccggataatggcaggtacgtactgcattgatattaagctgtttcataactttgatatcttgtatcatacgttcgagggaaacgacataaccaccgtccgggtccatttcatgacggtcggctcctttaaagagtactggttggccgttgacgagtatttgtccgcctgtcagttcgatcttgcggaaacctaccttgacagggatcacttcagtaacggtacttccatttttcagagtagcggtcaatgtgtagaggttgggcgtttcagcagtccatttggcaggattggctacgttgatagtcgtgttcaatttgccggaacctttcagatcggctgtggctacactttttccttgtgcgtctgtcaggtcaagagctacagtgccgctgcctttcatgtcgatagctatgttcagtgtaccgtctttatactggctgtccagatcgggagtgacgcggatatcctgaatgcgtttcttgtcgcgtgcatacagatagcagtcgcgtcctacgccggaataacggaagaagtcttgatcttccagataactgccgtcgcaccagcggaacacctggaaggcaatcaggtttttgccgggtttcaggtagttggtcagatcaaattcggcttccagtttgctgtcttcgctatagcctacgtagcggccgtttacccaaagatacatattggaagttaccgagccgaagtgggcaaagatgtcttttcctttccagtcggcaggaagaacgatttcttttcggtaagagcctacgtgattgttttctgtggggacaaggggaggattgttctgaaattggtttctccaggcataaccgacatttacgtagatcggatcgccataaccattcaattcccaaacggcgggtactttaatattgtcccatcctttgtcgttaaaactggtctgataaaagtttgtcgggcgtgcgtctgcatttcttacccagttaaatttccagagaccgttcagagtcataaaattctgagagtcttctttgctgcccgctttagcttcatcagccgatgcataggcaaaataattagtgtgcattgcggagcggtttacggaattcacttccggatctttccactcgttaaagttttgtgcttggatggctgttgttagtcctagtgcagccaaacagcaggaaagtagttgtttcttcatgggttttttgtattaggtttgaatttcgggagtcaaagatagggatttattaacaagataaggaccaataatcattcatttaaggctactttttaataaattagctagaaagtgtagtgtttattggtgaagaacgtttatttttgcaccatgttacaatttgagaatcaaaagataaaacatatcgtgcgcaaagctcttccggtgattgcactggtggctatattgtactcctgtgccagcattggacggccggaaggcgggcctaaggattacgatcctccgcgttttgtcggcagtacccctgctgcaggtgcgattaataataagaggactaaagtttctcttcagttcgatgagtttattaagctagagaaagcaaccgagaaagtggttgtttctcctcctcagattcaacaaccggagataaaggcttccggaaagaaaatacaagtgaatctgcttgactcactaaagcctaatactacctatactatagatttctcggatgccatcgtcgataataacgaaggcaatcctctgggtaattttgcatttactttttctaccggtgcgcagatcgatacaatggaagtatcgggaacggtgcttgacgcctctaacttggagcctattaaaggtatactggtcggactgcatgcaaatctgaatgactccgcctttactaaacttcctttcgaccgtgtggcacgtaccgacagccgtgggcgtttctctattcgtggggtagctcccggcaagtatcgtatctttggcttgatggattcagatcagaactttgctttcactcagaagagtgaggtcattgcttttaatgattcactgatcatcccccgtatggaagaaagacttcgtatggatacggcttgggtggattcattgacttatgatacgatcgttgagaagaaatatatgcattatttgccggatgatgtgattctccgtgcttttaaagagctcaattattcgcaatatttgattaagtccgaacgactggttccccagaaattcaccttttattttgctggcaaagcagataccctgcctgtactgaaagggttgaacttcgatgagaaggaggcttttgtgatagaaaagaaccaacggaacgatacgattcattattgggtaaaggactctttgctctataaacaggatactctggctcttagccttacctatctttatacggatacgctgaaccagttaattccgcgtacagatacattgaaattggtatccaaacaaaagactctgaccaaagaagagcccgagaagaagaaaaagaagaaaaagaaagagggtgaagaagatgagccgataccgactaaattcttaccggtgaatgtgaatgcaccttcatcaatggacgtgtatggctatgtttctttaaactttgaggagccgattgcaagttttgatactgcggcaattcatctacggcagaaggtggatacaatttggaaagatattcctttcgaattcgaacaagactcattgaatctgaggcggtttaatctgtatccggcaaatgattgggacgctacaatggaatatgagttctcggtggactcaactgcatttcatggcatttatggtttgtttaccgataagataaaacaatcatttaaggtacgtagtgaggatgaatattttactcttcattttattgtaacaggagcagatcctcaggcatttatagaattactggatacccaagataaagtggttcgacgaagactggtggatgatggaagggcagatttctattacctgaatccggggaaatatgccgccagactgatcaatgatagaaatggaaacggagaatgggacacgggagactatgcaaaaggaatacaaccggaagaagtttactatttccccaaggttgttgaatataaagcgttatgggatgttgaccaaaactgggatatacacgcaactcctgtagacaaacagaaactggatgaactaaaaaaacaaaaaccagatgaagacaagaaaaagaaagaaagagaaagagatagaaataaccaaaaccgtaaccgtcgctaatttgcgacgtcatctaattgttggaattcttgcattgttgatgggaagttttgcgcttcctgccaatgctcagtgtgaagctaaaaacgatgcttttcaatccggagagcatgtaatgtatgatttgtacttcaactggaaattcgtttgggtgaaagcgggtatagccagtctgacgactaatgcaactacctatcattcggaaccggcttaccgtatcaatctgcttgccttaggtagcaagcgtgccgacttctttttcaagatgcgcgatacactgacttgcgtcatgggtgaaaaactggaacctcgttatttccgtaaaggtgccgaggaaggaaaacgctatacggtagatgaggcttggttctcttataaagacggcctttgctttgccaaacaaaaacgtacgttccgtgacggagaagttcaggagtcggaagaaagcgacagtcgctgcatctacgatatgctgactatccttgcccaagcgcgttcttatgatcctgctgattataaggtaggcgataaaatcaaattcccgatggctaccggacgtaaagtggaagaacagacactgatttatcggggaaaagagaatgtgaaagcggaaaatggggttacctatcgctgcctgatcttctcattagttgaatacgataaaaaagggaaagaaaaggaagtgattactttcttcgtaacagatgataagaaccaccttcctgtccgtttagatatgttcttgaatttcggttcagccaaagctttcttaaatgatgtcagaggtcaccgtcatccattgacttctatagttaaatagtctgtctacagagtaaaaggtactttctgatctttccggaaaacacttgattcgaatgtagcgatcaagtctccgttctggttagtaacatctacttgatagcagccggtgcttcggccgatataccgttcgcgtgcctcggcatagagagtgtcgcccggaccgctggcacgcagaaaagtgattgaggatgaaagagagaaagcgagtgttccgtgcgaattggcagctgcggcgagtgccagatctgccagcgtgaaaatcgctcctccttgtgtccgcgctccggcattaagatgttcgggttttatttccagtttggctttactgtatccttcgcgtacttcaagcaatactacgcctgcattttcggcgaacaggtcctttttaaaaaactcttgtggggtcataatgattaattttgaattactaatttgaaacgttgaatgataagttatgagagccgaattagcctataatttaaaattcaagattcttccgcaaatgtaataaatatattcccatatatggctgtcggatacttacgtttttagggggtattattcttcatcaatctcgaataccttatgactggtatggtgtttgcattcgtatcatctaataaaaatgctatatggagtatcctgataaaagaaagaggagataagcttctatgtttaatcaagtgcttgtctcctccttttttaattttctcttaccattcaatagcttgatcctcatccggtatcaacgggttgatctggcgttccattgtcatagaaccttttacttcgtaagttatcggataatccggattggaagtgacatccgtgtacttataactcagttccagtgtggtaaggtggcgttccatatatttgatggtctcgtgctgaatgattcgtttttcatatttgcattctcccaatggtcggatattgattcccggttcgccttcgtcaccgtacaacttcaactttcctttaatagtaccttcctcgtcctccgttccttcttcaaactcgacaaatactttatacctggagcggttttcatcttccacccacgttgagccggcatagaagaaaatggtattctcgtccaccacgcgggctaagcgtgtatctaccttggcgggatcggttgtcgttccttcgatgtaaatgttcatcagcgtggtgttatacgttccggagtagtcattgaacagattgactcccagcagcgctttataacgtcccttatatttgttttgaacataagaagggtcttcttcaatagtcagcggaagtacgtatttctcatccagttccaacccgttaaagttgaaatggatggggtagagctgtatattctctcccgcaggaatatggcaaatgtttgattcaaaagaataatgctgttctgcaagggggacataccagaggtcctgacgacctacagggaatttttcctggttaagtattcggagcgtatcctcatccacggctatttttgcatcgatattccgactgttgcttttcgagccgctgacaatgaccggcaactggtatattcctgttccatccggctgatagcgtacataaatttcactcaagccgttgtcacctaaaggtgccttgaaagaaagcatctgtgtgtaaagttcatctttccactcgtcattgcatgcactgaatgttgcatacatccccagtatcattcctaaaatatataattttctcatattgatcttttggtttataatgttaacactaatcataattctgccatccgggagcttgtgagagattattgttgcgtttcagctcatcgaagctgataggccagaagtactgtttgcgtgagaaagaagtctgtagttcggccactctgactggcagataaaacatgtccttgtattcttcgttcatcagtgtattgcaaccgtagatttgttctccttcatgttcttcgacaattttccaacgacgcaggtcatagtagcgttgggtttctgcaaagaattcgatctgccgttcatgaactattttttcaaagaattttttcgggttttcatatacttcatcgctatagtcggggactccggcacgcatacggacaggcttaactccacggcgcatctgttctttgtcacggaagatgtcgtaagtctggcttccgtcccatgaggccacctggtagtgtgtcccttcggaaatattattcagtgcttctgcatacatcagtaatatgtcggcataacgtaatgtaggttccactttctggtagatcgagcctccccatttggcgcaatcgttcggatttacatatttcatgatgccgatgcccgtaatacaccagttatcagatccattgatacgcccgtcggttgctccgcgataataccagatttgtttgtttcgtgagtcttttcctccttcttccttaatgctcagtgcgttccattgtgctccgttgaaagctacggaagcatagaagcgaggctcacggttggtatatccccaccatacgccattttttacattgtcgtacttgtgttcatctttgttttcatcgtttgtgaacttccctttccataatgtgtagcattctttgtcaaatgatgtaccatctgccatagcgtatgcttcactctgcttcagggtcattccgtgtacgttatatcctccaaaagttccgggcagttgatgctttacgaaatctaccatcgtgttgtctgtttttaagtcattgctgtcaccattggttcctcgggtaaaaataagttccggattttcggctgcatagatatctccattaaaaagagaccgatatgattcaaatggatctatattggaccatccttccggaaaaggcttgttactgtattcctcatgatatggcggttcaatagtggttggataagcctcgtctgtactaaccgggcgcctttcaaaagtataaagtttgtagagtccgctcgtttccgagtactcgatcatgtctctggcggcagcagcggcttttgcccacttctcttcattgtattcttgtggaatcaactgttggccgtccttgttgatgaagtctgccatttccgtattcccgtttaccagcggactggcagcataaaggaaaactttggcacgtacagccagcgcggctcctttagtcgggcgggcaatgttcaagttatcgcgtttttcgaacagttcggtagctgcaatttcgagttctgaagtgatgaatgccacgcactcatcataggttttacgtgggtaggccagttcgtcatacgattttgtatagtcggctccttccggtggtagaatgggtatcggaccgaattttctcagcagtaaccagtagaaataggcacgcagaaaacgggcctgtcctcttatgtccgtcacttcctccggagtgagatcttcattctcatacaattcattcagtagaatggaggcttgatagattccgtcatacgaccatttccaagcattttggccgccagtggaatttaaatattcgccgcgtttgaatttggcaaaacggtctcctcgttcgttgaatacttggtcgtctgagaaattgaaagggcatacgtcactgtgtcccacctccagattatctccctgcaggcgactgtagcagaatgacagccattgaagtgtatagtctttgtccgagaaaatgcgttctgtagattgttggtctctgaaatagcggtctacatttaggaaatcggaacaggaagtgagtcccaagccgagtaccactgctcccaataaaatgtatttatttttattcataacttttcttttaatgattgttttagattcctaccgtcagtccgatggtcactgttctggataacggatattgttgtccattggaactacccagttccggatcccaaagcttaaagtcggagaaggtcagtagattcgttcccatcaggtagaggcgtacacggtccaaatggagtttattgacaaaccgtttggggatgctgtaacctaattccacattctttaaacggatgtacgaaccgtttcgcagccagtaagtagaagcacgatagttgttgctattacctccataactcagacgcgggtatttggcattcgggtcttcgttgattcccagcgaccagtagttacccactacatccgtcagaatattgccccatgacttctcttggaatggatatacggtgaatccgtctatgaagaaggatgacttgccggctccttggaagtgaacgttgatatcaaatcctttccattgtgcagatacaccgaacccgtaaatcaggttagggcgggtggtcgcaccgatgggcacttcgtcatctccgttaatgactccgtcaccgtttacgtccttgtatttgatgtctcccggcatgatgcctgaaccctgtgagggtctgttacggatttcttcataatccttaaacaatccttcggctatcaggccgcgtgcctggtctacacggaatccgtatttcatcttatacggatagcggctgttctcttcgtcatactccttgatttcattcttactataggtcatgttggcacgtaccgtaaggtctacctcacctatcctctgtttataagcgatattaccgtcaaaaccttcggacaagacagatcccacgttggcataaggtttcgttgtgatgtgattcagaccgatgatctgaggaaggtaactacgtaccatataaataccgttgcgttgttcgtggaagtagtcaatgctgccactgaacttatcattgaacatagagaagtcaagtccgaggtcatgtttcttggctacctcccaagtgatgctgcttgacgcaattctcgaataggtcagtccggtataataataattactggtgccgatatcaccgtaataataaccgtcttcatcccatgtcccgaatttctctacgtatgggaagcgggttcccacattgtcgttacctaccttaccatatgagtagcgcagcttaaacatattcagccatttgagatgtttcttgatgattgactcttcagcgatgttccatgctacagaataggcgggaaagaatccaaactgctgacctgaggcgaagttctcggagccgttgtaaccgaaattaaagtcaaagaagtagcggtatttccatccgtatgtgaaacgtcctgcaaacccctgatgacgattctgaatactctgcacaatcttctcgtagctatctgtattgccgttgtgagatgtattggtagtcttatcctgagaatactttaaaacggcccctagcatgtggtcgccaaacgtacggttatagtgtagctctgcctccaagtattccttccgttgtccacttgaatacatcgttccgtccatcagtttctgcgtctctattcttctgaattgcaattctccgtcggaggtacgctgccgttccgctaaccaactttccggccatttgaaacggttgtcaccgttatccgtatatgtatcgaatccgaaacgtccgtagaattttaatccctttgtgataaatttcaaatcttgttcaagattaaccgtagtctgtattttattcttccatgtttcctgatatccctgctgggtggtcagtacccacggatttcttcgtccttcactaccgactgctgcccatttcccgtcactatactgtaccggagaagcgatgggactgtatcccattagcgagtgccatatttcatgatactggcttcccggcaggttctgcttgtccaaagaacccgatacgcctacttttagcagcgtggattttgtcaggtctatgtctacattcatgcggtagttccagcgatggtagttggcattggtgttatagtccgtcattgcacgatccgtctcgtacatgccgccttcatttacataactggcagaaatgaaatagcgggctaccgtaccacctccggtcaagtctacagttgcgcgataagtgggggcaccgtctttcagtattaagttcatccagtccacattagggaaaagatcctgatccagcccgtttgcaaacagttccaagtcgctttcgctataggccggagcctgactacgactaaccaaggcttcgttcatcatgcgggcatatgttggaccgtccacaaattccggagttctggtgcgtgtattatacgaggtttctactttggcattgacgcgggtcttcccttccttgccgcgtttggtcgtgatcaagacaacgccatttgcaccgcgtgaaccgtaaatggcggttgcggaggcatctttcaacacggagaagtcctggatatcttccacattgatttcattcatatcacgttcgaagccatcgaccaacaccaatgcactgcctccggcaccgaaagtggagataccgcgtatccagaactcagaaatattgctacccggctgtccggaagtctggcgggcgagtataccggctacattgcctgcaagagcattggtgatgcttgccgtcggagtacgtagctgggaaacgtcgactgtggtaacggcacctgtcacagttaccttcttctgagcaccggtccctgtgacaacaacctcgtcgatgaccgtttctttcgtctctgccataacgatgttaatgatttttttgtctttgataaagatttcctgctttgtaaatcccacataggaaaaaatcaagtaagagtaattgggaaccttgatcttgtaacgtccgtttatgtctgttatcgcaccgaagccgggcatatttcttgctgtaacgttcacgcctattaaaggttcgttctttggatcagtgacgattcccgtcacctcaatcgtctcttgttcattttgagcgtagactgtagttgtccagcctactatcaataaaaatagtaagattacatttctcatatttacttgtgttttaaatagtattattccgttgtcatataacgaatccctttattatcaatatctccaatatagaacatatctgtatcagggtcgtaagcaagaccggctggctgattgaaacgtgcctcatgcaatggattgccgtctacgtatccccatattttgccgtcggcgttttcgttacttcgtccggctgcaagagacgctaccccatgaggatccagtttccagatgcagtgattttctctgtcacaaaaatagaagtcatattggtcgttgtcgggaccaattccttcgccgtatttctcgttttttacgaatacaccgaactgtggtttgttaaaccgggcgcttcctcccgttccttccttgaaacttttatcgttcatgtttccggcaatgatgctaggattaccgaatgtttttgccaccggatcataatcggctctgaacactgcgccaaaattgtcggaaagcatatacatgaatttattggacgggtgcctgaataatatcgtatgtgaaccgcccactgccgatatctgactcaggctaaaggcaacttccgcattctcgtcgatattgggaatagccccattgcgtatcattttgtagacttttccctcccaccaggtggtgtaaaagatggttccgtcatccatatacactaagctatatgctgtcctgccatagttgtagggacgaattcgtcgaaagttttcacgacggagagaataatagatatttgcccgggtggtgttgtcctgaccgtgatcatcggtaaatagcaacgtgtctccgtcagcactgaatgtgaaagaatacattgtgctatatcccgttcttgggaagagacgttttacagtccgttctgtcaggtctattagatggagaccgtcagaatggtttgaagaaaaaagtaaccggttgtccccatccttgtacttggggtcgaacaccatacagtcattggaaggaatagaagctccttcatcgaacgaaccctcttgaaatgcagaattattatcctcgtctaccttacgtagcaaggtacctacgatcgttgcaggagtgtacttgaattcctcttcaaatgtatgttctgcaataggtttgccatccggaccatctacacgaacattgattattccatcaaaagccttggaaggaaccatgcaataaatcttttttccatctgctccgatggttttggttttttctccaccgatcgtaatgtgaattttggtgggatcattcccgaagttactgccttcaatgtacaggcgggttcgcatacctccctctttagggctaaaatctgtaaatactactggttgagatgggtcatactgattagagttggctttatcatctttacaaccgatgaagaataaacagcagacaagtactgttattaggtggtttttcataaatataaataataaaatggttaaagtgcatccgaacaataaatattattgcttacaacgtttgcctatctttcttattataagcataatatgtatctaaatctttaggagttttaggtatccttcaccttgttgatgttggcatgttgtgctcataatatgttgtagatttaagtacaaatatctatatatgtctgattctcatcaacgaagagtttgactgagaaaagacatggcaaagctaactaaataagtaatttcttatttagtttgcataactttatgtaggtgtgatgatgataattataattaataatcaatcggttgattacaaataaatataataaaaatgtagaagagttagaatgccttttttttgaaatgaccagaatatattatatattagtcagattattataattgcattttcaatttcattaaataattaagcaggcttttggggaatatctgtgcaaatatgcccttcaagggagaaatgtaccaaatttgtccctgaattggattatttgggacggtctattctatttgaaagtactacttttgccaccagataattattaacttaacaaataatccatgtattatgaaaacaattcttagcgcattgggactttcgcttctgatctttacgagttgcggtggacaaaaaaaggttgaagtcgattttattcaggacaacatcgacaacgcagtagcacaaaacacaattcagacagacattatcgagaaatccggtaaaattctgaatccaagaaccatcaatgcagatggtagtatctcctatatacctattgatgactggtgctccggtttctttccgggcagcatgtggctgacttacaatctgacaggggataaaaagtggttgcctttggcagaaaaatacacagaagccctcgattctgtgaaatatctgaagtggcatcatgatgtcggctttatgatcgggtgcagttatcttaacggttaccgttttgcagataaaaaagaatataaagatgtgattgtagaagccgcaaaatcattgtctacccgtttccgtccgggagcaggcgttatccagtcatgggatgccgataaaggctggcagggaacacgcggatggaaatgtccggtgattatcgataatatgatgaatctggaattgctgtttgaagctacggctttttccggtgactctaccttttacaatatagcagtgaaacatgcggatacaacgatggctcaccacttccgtccggacaacagttgctatcatgtggtagactacgatcccgaaacaggagaagtgcgtaagagacaaacagcacaaggatatgcggacgaatcatcatgggctcgcggacaggcttgggcattatacggttataccacttgctatcgctatacaaaagacaagaagtatctcgatcaggcacagaaggtgtataacttcatctttaccaataagaacctgccggaagacctcgttccttactgggattacgatgctccgaacattccgaacgaacctcgtgacgcttcggcagccgcctgtacggcctctgctctgtacgaactcgacggttatctgccgggcaatcactataaggaaactgctgataagattatggaaagcctcggctcaccggcttatcgtgcgaaagtgggtacgaatggaaactttatattgatgcactctgtgggcagtatccctcacggccaggaaatagatgtgcctttgaactacgctgactattacttcctggaaggattgatgcgcaaaagagacctggaaaagaagtaagaactgccttgcttgtactttagccggatatgtgcatatattagtctcttccggtacattaactgttattctttatatcatgataaacaaatcagtaaacttattgatgggaggcttgaccctctttgcagcgcaagactgtaaagcccccaaacaggtggcagagcaagcgaaacatccaaacatcatctatgtatttcctgatcagtatcgcaatcaggcaatgggcttctggaatcaggaaggtttcagagataaagtaaacttccggggagaccccgtgcatactcctaacatagatactttcgcacgtgaatctatggtgctgacttccgctcaaagcaactgtccgctgagcagcccccatcgtggaatgttgctgaccggtatgtatccgaatcgcagtggtgtacctttgaactgtaactctacacgtcctatcagctctttgcgtgacgatgcggagtgcataggcgacgtattcagcaaggccggttatgattgtgcttatttcggtaaacttcacgctgacttcccgaccccgaatgatccggagaatccgggacaatatgtagaaacacagcgtccggtgtgggacgcttatacgccgaaagagcagcgccatggtttcaactattggtattcgtacggcacgtttgacgaacataagaacccgcattattgggatacggacggcaagaggcatgatccgaaagaatggtcaccgctccatgagtcgggcaaagttgtttcttatctcaagaatgaaggaaacgtgcgtgatacgaagaagccattcttcatcatggtgggaatgaacccgccgcatagcccataccgttcgctgaacgattgtgaagaacaggacttcaatctttataaagatcaaccgctggacagtctgctgattcgcccaaacgtagatctgaatatgaaaaaagcggaatccgtccgttactactttgcttctgtgaccggagtagaccgtgctttcggacagattttggaagcactgaaacaattgggattggataaaaatacagtagtcatctttgcttccgaccatggcgaaacaatgtgcagccagcgaacggacgaccctaagaactctccctattccgaatctatgaatattccgttcctggttcgtttccccggtaagattcagccccgggtagatgatttgttgctttctgctcccgacattatgcctaccgtactcggcttgtgcggtctgggggattcgattccttccgaggtgcagggacgcaacttcgcacctcttttcttcgatgaaaaggcggaaattgttcgtccggcaggtgcgttgtatattcagaatctggatggagagaaagataaggatggattggtgcaatcttatttcccctcttcgcgcggcattaagacggctcgctatacattggctctgtatatcgaccggaagacgaaacagctaaagaaaagtctgctgtttgatgacgtaaacgacccttatcagctgaataatctgcctttggatgaaaataaggaagttgtggagcaactttatcgtgaaatgggaacaatgctgaaagaaatcgacgatccgtggtatacggaaaagattctttcggaccgtataccttactgataccgtatactaatacggtttgtatgacacccgggtctcatacataccgacacccgggtctcatacataccgacacccggatctcatacatgctgacacccgggtgtcgtgcatcctgacacccgggtgtggtaagaactgcctttaaacaattaatgatcatgaaagctgtttgttttatatttctgttcttgttttgttctttgtcctcttatgcgcaggtcatagggtttgaagaaaaggttcccgagacgttcaaagtttcggggaaaggtgaagtgaaactttcttctcttttctataaagagggagaaagcagtctggaatgggatttccaacctgcctcgacactggacgttcagatagaacctttatcgctgaatgccaaaaaggaacagcaatttggtattaccctgtggatatataacgagaaaccccaacaggactctatccgttttgagtttctaaataaggcgggtgaagtctcttattggttcacgtatcatctgcaagcggcaggctggcgggcttgctggatatctttcgcctacatgaacggggataagaaagataaaaatatagtttcttatcgtctggtcgctcccgaccgtaaagggcgcatctttctggatcgcctgacctttccggaaaagaagatgaacctgcgcacgacaccggaccaacaactgccagctaacaacggtctttccaatcgtgacctctggcattggtgtcttgtatggaagtgggaacagcagtcttatgatgtccccttgctttctaaactgacaactcggcaaaagaaggacttgaaaacaatcgaacaacgcctgactgaatttctcgatgtgaagaaagctccccaaggacagatcaacgctgcaaggaagacttttgaaagagctgccattgctccctccgcagccgggaccggctttaccggaactcctgttgtagcaccggacgagcaagacaagaagaaaggggagatgtcatggaatgatatcgaaacgatgcttgccggctttgcatacgatgccttctacaatcagaatgagacatcgaagaagaactattttaccgtattcgactatgcaatggatcagggattcgcttttggcagcggcatggggacgaatcatcattacggctatcaggtacgtaaaatatatactaccgcctggctcatgcgggacgcgatttataaacatcctcaccgggatgcctatctatccactttacgtttctgggctgctttacaggagactcgtcaaccgtgtccgccggagcgggatgaattactggattcatggcatacgctcttgatggcaaagtttatctccgccatgatgttccccgatgcaagagaacaggaacaggctttgaatggtttgtcgcgctggttgtcttcatcgctgaattatactccgggcactctcggcggtatcaaagtagatggaacgacctttcatcacggaggtttctatcccggctatacaaccggagtactggctaccatcggccaatttatcgctctcaccaacgggaccggatttgaactgacggaagaggcacgtcaacatatcaagtctgcctttctcgccatgcgcaattattgtaacctttacgaatgggggacaggcattagcggtcgccatccttttggcggaaagatgggaagcgatgatatagaagcatttgccaatattgcattgtcaggagacttgtccggtcagggaaatacattcgatcatggactggccaccgattatttgcgtctgatacgtgatcggaatacaaggaatgcacatttcttcagaaaagaaggtattcagcctgcacaggctccccacggtttttttgtttataactatggatcggcaggtattttccgccgtgcagactggatggtgacactgaaaggatataccacagatgtatggggtgctgaaatctatgcgaaagataatcgttacggacgttatcaaagctacggatcggtacagattatgggaaaaggaaatcccgtctcccgtgccggaagtggttttgtacaggaaggatgggactggaaccgtctgcccggtacgactaccattcatcttccttttgaactcttggacagtcccctgaaaggtacgacgatggcacggtctacggaaaacttttccggaagcagctctttaggcggcatgaacggaatgtttgcaatgaaactgacggaacgtgattatgagaactttactcctgactttgtagcccgtaaatccgttttctgttttgataaccggatgatctgcctcggaacaggcatcacgaacagcaatgctgactatcctacggagaccactctcttccagacgaaatttaacggcaaagagcagaagacaggtaaggataactattggttgcacgatggctatgataattattatcatgtagttgacggaacccttcgttcacagatagccgaacaggagtcgcgtcatgagaaaacccgcgaaaagactaaaggaacattctcttctgcctggattgaacatggcaacgccccgaagaatgctacttatgaatatatggtactgattcagccttcagcttcggatttggatgaactgaagaaaacgcctgcatacgaagtatggcaacgtgatcagactgcgcatattgtctatgacaggaaaacgggtataaccggatatgctgtttttgaagattaccggtctgctgacgataagctggtggttgcttccattcctgcggaaacgatggtcatgtatgcggcagagggaaaaaaggcgattcgtctcagcgtctgtgacccaaacttgaatattgcggaaaagacgtatacgacaaaagaaccgagccgccctattcgtaaaataatagagctgaaaggacgctggagtttcttggagacaccggcgaatgtaaagcttgaatataaaggtgcccatacgatactggatgtaacttgtcagcatggacaaccggtggaaatgattcttgaaaataaatgaagagagaatttaaataggtattgatgtttgtgtttctatgaaagaaagagggtcggttcagcgaagaatcgaccctcagttttatatgcggttaatgagacagtttgctagggagaacttgaattacttgtttaatctccattcgaaaccatcttttgtatctttcacttcaaatccgagtgcagtcaatgtattacggatttcgtcggaagtagcccagtctttgttggcttttgctttcatgcgttgttcaagaagcatatcaacgactttgccataagcggcttcgcgaccgtcggaagaacctttctcttctttcagccccatgatgtcgaagcagaacaggtggaaagtttctttcaggtctttcagatcttctgcggagatcgttgcatttcctgcgttgatattattgatgatgcgggcaccttcgaaaagctgtgcgatgacaataggagtattcaagtcgtcattcatagcttcgtagcatttagcacgcagctctttcacgttgataccttccgaagttgttgcggccggagtgatcttgtcgagtccttcgattgcttctatcaaacgttgcagccctttttccgaagcttgcaatgcttcgttactgaagtctacagtgctgcgatagtgagcttgcaggatgaagaaacggatggtcatcggagtgtaggcttgtgccagcaacttgtgagtaccgttgaagaattcatccagcgtgatgaagttgccgagtgatttacccatcttcgtaccgttgatggtaatcatgttgttgtgcatccagtagtgaaccatgtcatcgccttgcgaagctaccgactgtgcgatctcacattcatgatgcgggaagatcaggtccattcctcctccgtgaatatcgaagtgctcgcccagatacttgcgtcccatggcggtacattcggcatgccatccggggaaaccgtcgctccatggagaaggccagcgcatgatgtgttccggctgcgcttttttccagagggcgaagtcggcgggattacgtttttcgctttgtccatcgaggtcgcgggtggtattcagtacgtcgtccaagttgcgccctgagagtttgccgtaatgataatccttgttatatttagctacgtcaaagtagacggaaccttcgctttcgtaagcgtatccggcgtccagaatcttctgtacgagctggatttgttcgataatgtgacccgaagcgtgcggttcgatgctgggagaaagtacattcagtgcttccattgccttatgatagcggttcaggtaatactgaacaacttccataggctccaattcttcgagacgggctttcttggctattttgtcttctccttcgtcagcatcatgctctagatgaccgacatcggtaatatttcgtacatagcgtactttatatcctaaatgagtcagatagcggaagagtacgtcaaatgtgatggcgggacgggcatgtcccaagtgagcatcaccgtatactgtcggtccgcatacatacatgcctacatgcggtgcgtgaagcggtacgaatagctctttttttctatctaaagtgttgtagatggtcaattgatgttccataacgtttactatttattcgatttgaaaccacaaagttagaataaaactttgatatataatgataaatcaacttgaaatctgtatccggaacattatattatatgtatcaatcattaagtaaaaaccatcgtctgacttggattggcggaaaacaatatgtatattgaataaattgtaaagatcaagttaaattatatttattcgtgaaatataatacgatgattagcagtatattcattttttatttttatatttagcgtattaaaactaatacacaaacattatgaaagaagcacaagacataagacaagtaacatctttggatgtcattatctgcaatccatattctgtttgcgttttatcctattgctctcccaataaagaagtctgaatacatacaaacaaaataagaatatggaagatcaggaactattgcatagatattcagttaccaacattttgaataatgacttttattcatcattgggattggcgcacggtaagatgcgtgctgtgattttcttttttcactgtgctcgttgttctggtgatgtgtactatgaagaaattgccggcgacttgttggataagcttttagaagaactttctttagaaatacctctcacttttgcggatggactgtgtggcatcggctggggaatagaatatctgatccaatccggttttctggaaggggatgccgatgagattcttgtcgaagtagaccagtgtgttctatatgcaattaattacgaaccaatcagtgaactggggttagataatggcattttaggcttgggacgctatatactgatgcgcctgcgtccaagctggcaaaggggcgatacctattctagcatcgaactaaaagaaaatttgatttacttgatcgactggatggaccgaaaactggatggaccgggaaatgatgtaaatgaccttctcgactggctactcgaactgcgtgtgacaggattctataagacgaaagtggacaagatgataaacaaaataacatggaagagttaatctatgacattggatttcataaaggcgaagatactcttttttatctgttgaaaggttataacgtagtggctgtagatgcagatattgaactgatagaagaaggtaaaagctcttttaaagagtatattgataacggcaggcttatcctgcttaattatgcgataacgaatgagagtgataaagatataaatttctttattagtcaaaatactctttggaactcgaccaatggtgcggtcgcttccaggcagggaaataaaacactaaagaaaaaggttcggtcaaaacggctggatgacctattcagagaatatggaatgcctttttattgcaaaatagatatagaaggaaatgatattattgcattgcaaacaatagaaaatagtgatgaaaagcctccatatatatcagtggagacagaatgcctgggagagaatgaaaccattgcgatgggcaaggaactggagactctggaacgcttgtatcaattaggatatagaagatttaagttggtagaccaacaaacccttaccgtattaagtaaacgcgacttctattttaatattcctgaacatcattggactgcgcaaacagcaatagattgtagatacgcaaaagaacaattagaactcacttcaaaccaacgaggaatgaaatttacggatttctttccaaatgcttcaggaccattcggtgaagaactagccggcagatggtacggctataaactagctagggaaatacttaaaaaacatagaagagataagatgcaactggatgaaccggaatggaccttctggtgcgactggcatgctgcattttgagtgttatagaaattgtattaataaaaaggtatctatctcatggaaaacacagaacaaataacaataataaccacgcttcgggtcgatagctccgaacgtcagcgcaatatggacgctgtgctccgttatctacagcctacaggtatccgggtgcttgttttggaagcagacagggagaatctttatacgacatggaaagactttgagaatgttgatttctgttttgtgtatgacgaagaccctgtcttttatcgtacacattatttaaataggctattgaaaagatgcacaactcctgttgttgctgtatgggatgccgaaatgatacttccttataagcagatagacgaatcattggatatgattatgaatgggaaggcggcaatggtgattccctatgatcaaactgtcctgtttttgtcagaagaacagactgttgcaagcttgagagctgactctatcttagaacatttgcagctacactcagcttcttataggcggtggcttgggcgcccttcctgtggcggacttttctttgtgaatagggaggtctacttgaaatgtggcggagagaacgaacatttttatggttggggacctgaggatgccgaacgggtccggcgaatggaaatattgggttatcctgtaggtgtgaataccgaaggccctttatatcatttgtggcatccaagaggagataactctcgcttttttaataggcagcttgcttccaacagtcgtttggagttaatcagaatttgtaacatggatactaaggagctaacagatgatgtagcatcttggagaaatcggaaataaatatggaagataaagatttattgttaagtcggatagccaatcatcaattaatgtttggcagttttaatacagactcaagtattgtatatggtcgaatgggactcgtactttttttctttcactatgcacggtatacagaaaataccttatttgaagattttggaggtgaaatattggatgaaatctttgatgatatgcatacggagatgatttgggggtttgaatccggactgtgcggcattgcttggggtatagaatatttgttggcaaataaatttatatcaggtgattctaatgaagttctttttgatatcgatcagaagattatggagaaggatctgagacgtatcaccgattactcttttgaaacaggtttggccggtttagcttgctatgtttcattacgccttattggaaagaatgaggaaaccgcttttgataagagttttattgatgaattgatgtatgcttgctccagaatggaaataagcgatcataattctactgttggggttgccatgttgcttggtttgtataatgggaaacgggttgattatccatatattgatataataaaacggattgtaaacaagcaggtcgatggcaaacaggaagaattatcatggagaaatggattgaaattattattgctatgaagcaaatttacttaatcaatacaagaaatagagctgccagctatggtataggtacttatataaaccaacttataacgtgcctttgccaaactgcatctttgtatctcacggtggtagaactggattctgatgaaaaagaagttacactagtgaaacaagataatataaggtatttgaaatttcctcaaataagcagcttcctctacaatacttatactgatagatataatcgtaatgtagcttatttattgtccttgtttgttgatgaaaagattggttgtatttttcatttcaattatttacatcatgcttctttggctaggtgtattaaatctcgattcccagaggcatctattattctgacgatacattattttaattggtgtctccttttgaaaggtaacaccttgttatttcgtgagattatatatggcgaaaaagatgaaagaaatgattttgaacaaatgatttatatggattttctgcaggataaatcttttcttaatggcgtagataaagtgatttgtctctcacaatacacttataagctactaaataatgaatataagattcctgattctaaaatagtgtctatggttaatggtattcgtctgcctgatacgctgctgaacgagcaggaatgtgagaatgaaaagcgtaagatggcatttggaaaggatgaaaaagtaatactttttgtcgggagattggatgagataaaaggagtcagtttaatcattcaagctttcaaaggaattcgggaaaaattgcctgatgcccatttgttactggtgggagatgggaattatgataaatatttgcctttatgtcgggattgttttgggaagataacgtttgccgggaaagtagataaggagcttttatcagtcttttatcaaatttctgatgtcggagttatggcttctttccatgaacaatgtagctatgtggcaattgaaatgatggcttatggcattcctttggttggtactgatacgacaggacttaaagaaatgctcgaagatgaatgctatatttcggtagaatatattgaaggtaaaaaagatttgataatgaatgctttaactgaaaatttattgactgttttatcattaaaccggcataaaagaataagagatcaatcatggaagtataatatagagaatgtaaaacttcaactcctctctttttatttgggaatgtaacacgcgtgttatttattatattgtttaatttaattttttgcaagatgaagaaaatttcaaaaattagccttcatcagctcgatagagctgagttgagcaaaaagcagcagggtcttctctttggaggaggcgacccaggttggtgtaaatgtggctcttgtgccactccatcaggtggatcaccatcaacagcagagaatgaggctgcaaacaaggagaatggttataccattaccggttcaaatgatcctgtttgtgtttgccaaggtggtgaaggtagtgctatgcaaactgtttcaaaatagtgaaatggcttgactagacattgagagtggttatactctcatgtataactactctcttttaattgtaaaattaaagctattattatgaaacaattaattattatgtttctttgtgcctttctatttgcatgtacttctgcaaataaaggtcgaatagggaatgaacaggatattacgattatagatttgagtgatgtgaaatattccgaagaaccgtcgaagctatcggagtttgtagaaagtatatcttatatacgtttagatgatacgccattgattcctgatctactttttacaggtatagcggtaattgatgatgccatttatattgatcagaaatttgtttataaatatactcttgatggtaaattcttgatgtcattatttaagcaaggacaaggaccgggggaagctaataaagtagcgacgagggctgcctatgatttagaaaacaagatggtggctgtcaataataatatgggattaacatttcgtctgtattcattggaaggtgagcatataggtgacgtttcaaaagcagatagtattggttggaataaaacaattatttcttatgtaaatgggaatgaagtatattattatctgccttggtctcgccctttgagaggcgataccatcaattacgatggtcccaattttatatttgcaaaagatttgcaaacggattctattgtttatcgtcaacagaattatcattatgatataaaagctgtagttcagaatggaatagtaaaggatcaaggctatcctttcagttatggttttaatgacaatctgttttggtggaaacaccaatctgtggatacaatttattgtacttctgactttaaggatgtgcgtccttgctatatcatcaagaaagataaatcatttgcagattatgatttttgtgttcatcgcatggtactggacatccctgaatatgattttggacgtagattgttgtctatggtatatccgttgggaaatggtgttttgtatcatgtagcaggaagattggatgactccggctcgggtttctgtaagaataatgataaggccttgacgttctctccaaatggctttgttaatgatgttgatgaatgctttaaatactggaatccctctggcgttttaggtggaagtggatgggtgaaagatggatacctttacgctttaatgaatgcttatgagttctttgaagaaggctgcaaacctccattctcggacttgacagaagaaagcaatcctgttattgtaaaactaaaattgaaaaagtatgaggaatagtgatttattagagcaacttcagcagaaagatgttacttatgtctacaatttgtccgggcataatgtattgaattctttgataaatttaaagcaattaacctttgaagtgacagatgcctgcaatcttaaatgtaaatattgcggttatggagatttctatgaaacgcatggaaaaagagaggataagtttcttcagtttgatgttgctaaaaggctaatcgattatctttatgatatatggactaatcatcaggcagcttcctctcctcataagattgtattcggattctatggtggagaaccactcatgaatatgagccttattgaacagattgttgcttacctggagtcattgccgacaatacccggagtgaaatacggatatgcaatgacaactaatggaatgttgttggatagatatatgtctttcttggcagaaaaggaagtgatgttgttgcttagcctggatggtgacgaatatgctcagggatatcgtgtggaccatcggggagctaattcctttcaacgggtgtttcataatatgaaattgttgcaatcaacttatcctgaatattttgcagaacatgtgagttttaattctgtaattcatgataaaaataatgatgttgaagttctaaagttcattattgagcattttaataaacgtcctcgattggctgaactaaataattttggaataagtgaagctaaaaaggaggaatttaggaaaatgtttcgatccgctcaaactacggaattttcatgtgctgatagtgatttcctgtatgcttcttctgatgtgatggatcttcttagactgatagacagattgactgataatgtttattatcaatataactcgttgttgaaaaaaaatgcaagtataatatttcctacaggaacgtgtctgccatttcaaaaaaagatatttctcacagtaaatggagatatactgccatgcgaaagaattgatcagaagtatatattggggcatgtcacatctgaaaaagtcgatctggatttggatgcgatagccaaacaatactctgcatactacaataagaccaaacacttgtgcaaggcttgctatatgaagccgttttgcaaacagtgtttgttctatatggagaatttgtcgtcttctcctagatgccccggttttaaaaacaggaaagaagcgttggattatttgggctattatctgaatatgctccaacaacagcccgaaatatatgcaagaatatcaaaagaactaatggtacagatatgatgaaaccgacttattattacaccttatatcctgatacgtttctgtggataaatgaaacggaaggagttatgtataatgcaaaagaacacacttacttgagtttcgacatacacggtttgataaagaaatactgcttgatgttgaatgaattaagaaacttgtacactatagatgtatcaccggaagactgggaagatactgatctgcgatcatggatgctggatacagtagaaaataaaatggggtgtctgattgaatattcggataccgaatcacgccccatcagttttcctccattactcaacctgcaatcggatgtagaccggattgaaaaggagaaaggaagagaagtgggggaatatgtagcttataactggaacgaattatccctcttcctgggtgggcagagtgaacaccccgattactgccggcagtttctctatccgatagccgatgaacacttcttggatattcagacattggaaacttttttggctacggcaaacaatacttatctcttgcaggtcaatgtaataggagatatactgcaatatccttataaaaaacaactgatgtgcttattaggaggtttaactgcgaaagtttgcctgtatatgctgggagataatgctaagggtatcggggacttgttgaactcttcggagtttgataaagacaaatatgaattaaaactttactatgccgggcaaaactcatttgatgaaataaaccggatgctggcagattcttctatatcgttttcatggatctatatcatactcggagagtctgatatagaggagatggaagaaatgaagcaaaacaacgttaatgtggaaattattccgtgtcctgcctttaccggagataatttggatttctttgagcaatacatatatacttgtaaagaagatattactgtatgtagttatgataaaaaagatatttttgcgcatcaggtgatgaattcaaattattggggcagattgtcggtattccctgatggtagtgtttattctaatattaataatcctcctgtcggtaccataaaagatactatatatgatttgataatcaaagagatgaagaatcgctcggcttggagattaacacgggacgttactcccgaatgtgcaaagtgcctgcaccgttatttgtgtccgccgccttctaattatgggtttgtgattggaaaattcaatttatgccatctgaaatgaataagcagatatatgttttagatgaatacatcacttctactaaaaatgggataggggtatttatcactgagcttctacagtgtctaaagaaaatggatgtggatatttgccatgtaatctttaatgtcaggcaaccggagattagggtatgttctaaaaatggaatgaagataatatcgatacctcgttttccttctggtaatttctttgataactggaaagtggtgaacagagtttttcgtctgttcgttcctgattctttggagaatgtgttttgctttaatcattctccttgtcctgaattgctggagagtctacgcaactctcatcctttgtccaagcaattgtatgttattcataatctttggtggacttcacctttacttggggatgactgtttgttggcaaatattgtaaagaatagaagtagatcgttgaagaataaaacatataaatggattttaaatactgttgataaggagctacagatgtgccagacagtagatgcagtagtttgtctgacaaaaggaacacatcaagtacttactaatatctataggattgatcaggaaaagatattcttaatacctaatggactgaaaagaaatcaatacataaactcaaaaatggataagaataaacttcgagaacaatactatatagatgacaaagagaaagtgattctttttgcaggaagactttctgaatttaaagggatatatgctgtgttggatgctttttgcatattactaaaagagttttctaatattcgtttagtacttgcaggttctttactacccgaatttgtcttgtctaattatgctcatatttctactaaagtaacatataccgggcatttggaacgtaaggagttgaagaagtggtatcaaatggcagatattggagtcattccttcttacacagaacagtgtagttatgttggtattgaaatgatgatgcatggacttccgatagtgacatctgatggtttcggtttacgggatatgtttaaagatcagggcaatgctatagtagtccctattgggaaaagaacaaagaaaaatggtacttttagtgagaatttggtccatgctttgactatgcttttatcttcggaaacactaatgaatgagattggacgaaatgcgcggaaggcttatctcaaacattacggtttatgccaaatgaaagagggatataaacgcttgctggatgctttttaaaaaattaaatatatgatggaaataccccgaattctttattcttccccttttatgggaaactatttttgtgaaatcgctcattataatatggcttttgtcgctatagcaaagaatgcagtgacttatcttaagagtctggctatctatgctaaaacaggtactgttgtttctgataaggaagaaatacatgaagtggtcggttatagttccatgaatggttatctatatccggtgaaacaacttgatggagagtggggaaatggtattatgaagtttgctgtttggagagatcctgttgaaagattagtttcctgctacaagaatttctgtttggaataccaccaccagcaacggcgttattttgagtatttggatttgtgtcgggaaccgtccttcgaccggtttatggaatttgtgcgttttgaactggggaaaagtgatcctctttatcaagatgagcacattcgtcggcagtcggattattattcttgcgaggatgtagactatatcgttcctatagaaaagttggatacctttctgcaggtatataagatccctcaggttggagatattagaaattctactcatgcaaaatttgcattgattaatactgattatattgaagagattaaagacctttataggttagactatcagattcgtcccaactactaattttatatttagatcaaatgaaaaacgcactaaaaacatgaaacgttttcctcattatatccaactggacgccatggattgtggtccatcctgcctccgtatgatagcgaagtactacggcaagacttactcgcttcaaacgcttcgtgcccgttccttcattactcgcgaaggagtatcgatgcttggaatcagtgatgctgctgaattcataggcttccgtacatccggtgtgcgaatcacttttaagcaattagtggaagatgtccctttaccatgtattcttcattggaaccaaaatcactttgtcgtttgctatgacattcgtaaaaagaaagacggttattgggttagtgttgctgaccctgctagccagttggtaacttataaggaaaaagaattcaggaaatgctggatttccacgaaagtaggtggggaagaaaagggggctgccctgacattagatcctactcccgacttttatgaaatggatgatgagaaaagggcgggggagcgcagcctctcttttttcctgaagtatctgactccctataaaaagcagttaatccaattagttttgggtatgctgactatcagtgtgctgcaactcatctttcctttccttacccagtctctggtggatgtcggcattcatggaggtaatctgtcttttattactttgatattgatagctcagctggtcgtctctctttctcagctctccgtagaatttattcgtagctggattatgcttcatatgaatgcccgtatcaatatcgcactcatttcagactttctggtcaagctgatgaagctacctttgcattatttcgatacgaaaatgataggagatatcatgcagcgcatcggtgaccacggacgtattgagtctttccttaccggctcttctatcagtacattgttctcatttgtcaacttctttatctttgctttcgtactggcttattataacttgggtattcttgccatctttctggttggcaactctctttatgtctgctggatacttctcttcatgagatatcgtcgggaactggatatccgtcgctttgcacaggcggcgggtgaacagagcagcctgatacagcttgtaaccgctatgcaggaaattaaactgaacaactgcgaaaagcaaaaacgttggcaatgggagcgaattcaggtgaaactcttcaagattagcgtgaaaggtcttgcattgggacaaacccaacaggtgggttccatcttctttaaccaaactaccaacatcgtcatctcttttattgctgccaaatcggtggtggacggcgaaatgactttgggcatgatgatgtctcttacctatattatcggtcagttatcgggacctatcggttccttcatcggttttgtccaacaacttcaggatgccaagatcagtctggagcgattgaacgaagtgcatggcaaggaagatgaggaacagaatatcgaatcaaaactaacattgctgccggaggaacgcgatatctgtatcgaaggactctctttcagctatgacggggcggaaagggactatgtattggaagacttgaatctgcatatttcggaaaggaaagtgactgcgatagttggtgcgagcggtagcggaaagactacgctgataaaactgttattaggtttttatactcccaacaaaggaaaaataaaactgggagagactcctcttgaaaatatcaatcctcatttatggcgttcccgtacggggtcggtgatgcaggacggatttatattttccgaatctattgctcagaatattgccgttggtgaggagcagattgatattgaaagactccggcatgctgttacggtagccaatattcgtgactttatcgattcgctgcctttaggctataacaccaaaatcggtatggagggaaatggtatcagtcaggggcaacggcaacgcatcctgattgcccgtgccgtctataagaatcctgaatttctttttttcgatgaggctacgaatgccttggatgccaataatgagaaggagattatggaacatttacatgagttttataaaggcaaaacagtagttgtagtagcccatcgcttgagtactgtgaaagatgctgataagattgtagtgctggataaagggcgcatcatggaagaaggtacccaccaggaattgacagagaagcgaggactgtattatgaattagtgaagaaccagttggaactagggcagtaggaaggagcatttatggtacaagaagacaaaaaggaatataaagaaatagaacttcggagcgaagaagtgcaggaagtgatgagccacgttcctgtgtggattctccgttgggggatcactgtcttgttttgtattgttatcattctactgattgggagctatctgtttaaatatccggatgtagtggaagcggagattacggttagtacacagaatcctccagcttatgtggttgctagggtagccggaagattggaagagttgtgtgcggagaacggtgcggtagtcaggaaggaggcagtgttgggaatgatagagaattcagcaaaagcggaagatttgtttttactgaaagagcgcatgaaacaatgggaagctcaagggtttgtcctgagtatggccgaacagcttttcgacgggcaatatttgcaactaggcgaagtacagcctgcctatgcttcgtttatttctgttctgaaagattatgcgagtttcgtgaaacaggattattaccgcaggaaactggagagcagtcggaaacttttggagagtcagaagacgtattaccaactggcagagaaacaattccagttgggcggacaagagcagatgttgataaaacgtatttatggacgtgattctactctgtataagaaaaatgcgatgattgcagcggaatatgatgagtcagagcgtagttatctgcaacaactgcaaaattacgaaggcatgcggatgtcgctttctcagattgagatgcaaatagagcaggggaaggaaagtttgcttgacgtccgacaccaggcactaacagaggaacagaaacatatcgtgaatcttaaaaatgcagttgagcaattgcaggtgagtatcacaacttgggagcaaaattatttgttaatggcgcccatatcaggaaaactgactttcatgagtgtatggagtaataatcagaatgtggcttccggtgaaagtgtttttgtgattgcacccgacgaaggagctttaccaatggggaaggcattgcttccggttcaaggctccggtaaagtgaaatcggggcaagaggttaacatccgtttgaataactatcctgatcaggagtttggctatgttaaggggcgggtctgtagtgtttctcctgttcctactgccgagaatatgtatgtggtggatatagaacttccggatggaatgcggactaattatggtaaggatttgcccttaacccgtgagatgaaagggattgccgagattgtgacggaggatatgaggctgattgaaagactgctggccccgttgagaaagttgaaggacaagatgggaggataacttttatacatacggggacagaaagcatggtttgcataatatgattatagtaatcgttctatcgcttccgcaaccccatcttcgtcattagtcagtgtaatgtagtcggcagccttcttcacaggctcctgcgcgttgcccatcgctatgcccataccagcgaatttgatcatcgacaggtcattgtagccatcgcctatagctatcacttcctcgcatgtcattcctatattttccaacaggacgctgagggataaagccttgtcgataccttgcggaaccaactccaggaaataaggttccgaacggaagacattgatctttccttgcaggcggatgcaaagctcggattctacaggaatcagcttgccggcatccccgacgatgaggcacttggctaccgggagggtgatgtcagtcaggaagtcgtttgtttcccgtatcgccattttattgagaaaggcttctttttgtacgtacggatcttgtgagttttcggtcactatttctgctccgtcgtaagtcagtatgcttagatgattggtgcgggcacattcgtagagtaccggaacgacttcattgggcagtacattctcgtacatcatttctttggtttcccagttgatgatctctccaccgttataggacaggataaatccgccgaactcattcatgcgtaactcgttggcgagcggtacgatgccgtaagtcggtcgccctgatgcaagtaccagacggataccttgttcttgtatgcgtatcagcgtttcccggttgcgggaagagatttcctttttagaattggtgagtgtgccgtcgaggtcgagcactatgagtttgtatttcatgtcgcattgttttgggttgcaaagataggagaaaatggatgactacaaagtgcgtggtaattaaaatatgcttagattatgcacttttatggtgcaatagtgagatgtttgattgttatttcagcaaatccgcccactgctcattgctcagtgcaggcagtgcctcactatccgtaataaatgtttctgccagcctcctcttgtcctcctgtagttggagaatcttttcttcgatactgttctgagtaataaaacgataggcgataacctgtttatcctgaccgatacgatgtgcacgggcgatggcttgtgactcggcagcaggattccaccagggatcaatgataaatacataatcggcttgtgtaaggttaagaccgactcctcctgctttcaaagaaataaggaatgcttgcacatccttttgctcggtgaaatgggcgatttcggaaggtcggttgttggtggaaccggtcagcagagcatacttccagccccgttggcggaatacctcggcaagtatctccagatgccggacaaaggaagaaaaaataagtaccttatgtccttcacttcttagtgtgtcaaaggtatcgatgatttgttccgtttttcccgatatcccgtcgaagtcgggaaagataagctgcggatggcaagccagttgacggagacgcaggataccgttcaggatgctgaacatatggtatctgtctctgttttcgggttgctggagtaatatgttgcggaggctgtttttctcctgttcgtagctctcactctgcttttcggacatggcgcaatagatcgtttcttcagtaagcgggggaagttccggcgctacctcgctcttgcttctgcgaaggataaacggagcgatgatctgttgcagccttttctccatacggacgtttccttgccggatcggaatgataaattgcttatgaaaagcgctttcttctcctaataggtccggttgcaggaaacggaactgtgcccacaaatctttgagagagttctcgataggcgtaccggtaagtgcaatccggtgcttgccctgcaactggatgaccgaacggaaagtaagggaatcattgttcttgatattctgactctcatcaagtacgatgtattcgaatgtgtaggagtggagaatatcaatgttattcctcatcatcccataagtcgtgaatatcagatggaaatgattgaagaacttttccggatgtcctttgggaaacgtggtgttgctgttatattccgctatcgcaagagtcgtgaagcgtttagcctctcttcgccagttgtggagcagggaagtggggacaacgatcaaagtggcaggcttacgggagttctttccgtgttcctgtctgtgaccatcttctttcggtttatttttctctctgatttcccgtgcgtccggcagcagctcatcttcggaggaaaacgagaataaggagaattgtccttcggcatctgctatctgctctttggtgggaggagtgttggcagtacattctttgtccggctgattgtcggaagctgtgctttctgtaaatacgggctttgtaggagcagtgaccgcatcgggagaaagcggtttgtatatatattgcagcagcgtcagcgtctgaagtgtctttccaagtcccatatcatctgccaggcagccgccgaatccttgcttgttcagctgcaccatccatgagaatcccttctgctgatagggtcgtagttccgctttcagtccttggggaacaggaacattacgtatctctctcttgaaaggcaggtttttaggtccgttctcttctaaagccgattgtacggcaccgacaaaggtcggtttcagacgaatccccgtctccgtctgggtgcccagttccaacaggtttccgtatttgctgaaccattcttccggtaaaagaatcatgcgtccgtccggtaacagaaactctcttttctcttcaaggatgtgcttgcggaagcgtgagaaagggattcgcagattgccgatgactaccgtgatatgcagttcaaaccagtcgggctcatcatcacaactctgttcgatgcggatttcgtccagacagtaaggggtattctccatatttcctgtcagcagaaaagactgttggagcatctcccgatatgtactgatccattcggtaattgtcttttcaggcgcatcgggcgacagcttgaaatgaacgtcgctgactcgttgcaagccggaatccgttaacatccggagcttctcttcttcggcatcgctatcccgacggaagaagaatatctcgccgaaatcgttccggtaaatgattttcttcatttcggtcacggtgttgggagtaaatgactggtctccataacggaagctaagccgcaacatctgttcgtcgtaaatggtatcttcaagagacaggacagcttcgcaggcatacgtctcttcaatgatattcagtccctgagtcgtaatttcatgatagcgtgctatcggaatgacgatgttatcgatatatttctcgatttgggaagcagggacgctgattttctttttcttggtaaagggcagaatgcgtacgctctcaatatgcggaaagaagtacagctccattcccagtaaaagggcagacggtgaggaggtcagcacgataacaggcttctgctcacttaatgagagcggctgcccgtcataatagcattgtagctggtagcggaaattggtctcatcggcaagaaacgtaaaacggatttccacgtcatgaggatgcacatgataggcatgatgcgcatatagcagtttgcttccgacctgtttctgatacagagggagattatgatggcgtatcaatgccagcatctcctgcaactttttctcgatgaatgggcggatattgttctttacccgttccggatcttcggataatttacgcagaaaacgggatactgttttctcgcgcgaatagatccccatcagatatttctctgtataatgtgaggcgatgtcgatagcttgttgctcggcctcgttcattcggttgattgcttcgggtgaagcgtgaaaagcctgttcaatgagttggtatgtaccgtcgtcagatttctctgccatataaggaatcagcagtgtgccgaacgtcagatgttcggttaaaacgatgataacttgtccggtatttgctttctcttccattctctttaggctttaacaaacaaagatacgggaaaatccttaattttgcagcatgatggaagaaaacaaacgagtattgttaggaatgagcggcggtacggacagttccgtagctgccatgcgattgctggaagccggatatgaggtgaccggagttactttccgtttctatgagttgaacgactcgaccgaatatctggaagatgcccgccatttggcagagcgtttgggaatccgccatatcacgtatgatgcccgtgagatattccgcaaacagatcatcgaatattttgtgcgtgaatatatggtgggacatactcctgtgccctgcacattgtgcaataactatctgaaatggcctcttctatccaaaattgccgatgaaatggggattttttatattgctacggggcattatgtacggaaagtaaaggtggatgatacctgttatataacttacgctgccgattcggacaaggatcagacctttttcttatggggactcaaacaggatattcttcggagaatgatgcttccgatgggagatattaccaaagtggaagcacgtgcctttgctgctgaacggggatttcagaaagtggcggtgaaaagggacagtttgggagtttgcttttgcccgatggattatcgaagctttctgaaaaagtggttggtcagcaattgtcagtcgcaggtcagcgtaggtcagccacaggtcagtgcaggtcagacttggtcaacggaagtcagacgtggacgattcgtcgatgaaaagggagattttatagcctggcatgagggctatcctttttataccgtcggacagcggcgtggcttgggcattcatttgaatcgtgccgtctttgtgaaggaaattcgcccggaaaagaatgaagtagtactcgcttccctacaggctttggagaaaacggagatgttccttaaagattggaatattgttaatcgggaacgtttgttagggcatgcggatatcattgtgaagattcgctatcggaaacaggaaaatcattgtactgtgacagttacaccggataacttcctgcatgtacaacttcacgaaccgttgacggcaatcgcatccgggcaggctgctgccttctataaagatggtttgttgctaggcggcggaatcattgtagaagaatcattgcttcagtctctataaagtttgaaaaagtaaaaatcatctgccatctgcaacagaatcgactcatcttattctttattttttgcttatagcgttgtagataccagttgcaagctggtgatacaaaaaaagtcccacagtgcatattatgtacactgtaggatactttctgtcatataatgatttaatttgttcggataactttattcgttgttcagcaccagcattgactctatatactcgcgtgtattgcttaatctgggcactttgtgctgtccgcctaattttcccttctgtgccagccagtcatggaacaatcccggacgcgcaacgatgacttccagtggttgcagagcaatatctttccaacgcttcgcctcatagtccgaatttacttctttcaatgtagcatcaagtattgcggcaaatttctctacggaatccggcatcttggcaaattctatcagccattgatgacggcatttggcatgttcgtccataaataccggtgcggcagagtattcgctcacctgtgcacctgtctcggcacaggccttagctaagcctttttcggcattatctacaatcagttcttctccaaaagcattgatgaaatgcttcgtacgtcctgtgatgacgaacttatatgggttcttgctggtaaacttcaccgtatcaccgatcatgtatcgccacaatccgcaggacgtagaaatcaccattgcgtaattcttgttaagctccacctcttcgaggcagtaagcgcgtggattttccttatcaacttcttccaatggaatgaactcgtagaaaataccgtagtcgatcatcagcaacatggcagggtctgaaagatcgttctgcgtaccaaagtacccttcggaagcgttgtaggtctctacataatgcatcttctttgagtgaatcacctgtttgtactgctcacgataaggggtgaaagccactccgccgtggaagaatacttccagattcggccacacttcctccagagtttgtttgccggtcttttcgagaatacgcttgataagtaccagcatccatgagggtacaccggacaaactggtcacattgaccggaatagtactgttggctattgcttctattttggtttcccattcgctcatcaaagcgattttcttgctcggcacacgaatgaaattgattaacggattgacgttctgaatcagaatcgccgacaagtctcccaccaaactatggttggagttgaggttcggactatggctgcctcccagaatcaacccttttcccgagaaaaagtgactgtccggattgatgcggaagtagagtgccgcagcatctttaccgcctctatagtgaatgtcttccagagcttctttgctgacaggcaggaatttgcttttatcattggtcgttccggatgatttggcaaaccagcgtatttccgatggccaaagcagattctgttcccccgcccgcaagcgttctacataaggctttatttcctcataagtctgtattggaaggcggtttctgaaatcctcatagctacggatggaggcgtagtcgtacttttttccccactctgtctgtgcagcttggttcactaagcgactcagcacacggtgctgtatctcactagcctgactagcataaaggtctatttgttttaaacgggaatcgaaagtcttactaataatctttgtaatattcatttctgctttaacataataatgtttagtcgtgcaaaagtaaccttatttatcttttttttctatctttacgacggaaataatcgttaaaatttggcgacttttcttgaatcccgagtttctgactaaaaaaaacgacaatgagaattggaatcctgacttccggaggagactgccccggtataaatgccactatccgtggcgtgtgcaaaactgccatcaatcactatgggatggaagtaataggaattcatagtggttttcaaggtttgctgacaaaagacatcgaatcctttactgataaatccttatccggattgttgaaccaagggggtacgatgttgggtacttcgcgcgagaaaccttttaaaaaaggaggcgttgtctcggatgtcgacaagccggcactgattcttcagaatattcaggaaatgggactggattgtgtcgtctgcatcggaggaaacggaacgcagaaaactgccgctaaatttgccgcaatgggcgtcaacatcgtatcggtccccaaaactattgataatgatatttggggaacggatatttcctttggatttgactctgccgtgagcatcgctacggacgccatcgaccgcttgcattctaccgccagttcgcacaaaagagtgatggttattgaagtgatggggcataaagccggctggattgccctgtattcgggcatggcaggtggcggcgacgtcattcttgtccccgaaatcccttacaacatcaagaatataggaaatacaatcctcgaaagactgaaaaaaggcaaaccctattccattgtagtggtggcagaaggcatcttgacggatggccggaaacgtgctgcggaatacatcgcacaggaaatagaatatgaaacgggtatcgaaacacgtgaaactgtattgggatatattcagcgtggcggttcgcctactccttttgaccgtaatctgtctacccgtatgggaggacacgcgacagaattgattgctaacgggcaattcgggcgtatgattgctttaaaaggagatgacatttcatccatccctcttgaagaagtggccggtaaattgaagttggtaactgaagatcacgatttagtaattcaaggccgccgcatggggatttgtttcggttaacttataatttactcttttatcgttaggatagtagttggaggcatcatgccttttcagtttctgttgcttcgatctcattaacagtcgtttcgacttcatttgcagccgtttccacttccggtgtttcggtctccaaggtatccggttccatggcttccgactcagtcaattcgggctcaaccaactctgtgtccacttctgacggcatcgaatgctgcgacttcgcttcattgactgtatccatgaatgtctggtctttcaccttcttgatagccatttgtgcggcattctgctgagactcttttttggaatagcccgtaccggttccggcaggaagcccttcgatacgaacctctgtctggaaaacgggattactgtcatggtcgaggaactgctcgatcaactcaaaggaaacctccatcttgttcttctggctccattcgataagcttggacttgaagttaacttctttgcgggatattttgtccagatcaatataacggttgatgatccgctgctccataaactgcttgcaacgcccatacccctgatcaagataaatggctccgataaatgcttcgaaagcattcccgtacatataactgttgtgggaagaggagcgggtagaatatttgataagtttgtccagaccgatctccacagctaacttgttcaaagtctcccgttgtacgatcttggaacgtgtgtttgtcaggaaaccttcccgtttcccttcgaaacgtttatagacaatatctcctacgatggcgtcgaggatggcgtcacccaaaaactccagtcgttcgttgttcagcggacgtcccttctcggagcggacggcagatgacttgtgcaggagcgcttgttcgtagatctggatattgtgcggataaaatccgagtatccggtaaaaacaaagataagactctctgtctttgcggaacaggagtcttatcttatctatttggttacgtaacacgattttactcagcgtatttcttgaagataacgcacgcattgtgaccaccgaatccaaatgtattggacagggcaacattaacctcacgtttctgagctttgttgaacgtgaaattaaggtcgtagtcaatgttctcgtcgttgtcaccttcttcgtggttgatagtcggaggaacaatgccgttcttgatggcaaggatgcttgcgatagattctaccgcaccggcagctcccagcaagtgaccagtcattgattttgtagaactgatgttcagttcgtatgcgtgatcaccgaatacttccttaattgctttcgcttcagaaatatcacctaccggggtagatgttccgtgaacgttgatgtaatctacttctttcggatccatttctgcatcttccagagcgttcagcattaccagtttggcaccaagaccttccggatgggaagctgtcaggtgatgagcatctgcagacatgcctacaccggcaacttctgcatagattttcgcaccacgggccttagcgtgttccagttcttccaaaatcaggcaaccgccaccttcgcccatgatgaagccgtcacggcttgcgctgaatggacgtgaagccttgctaggctcatcgttgcgtgttgacagagcatgcatagcgttgaaaccgcctacgcctgcagggaagatggctgcttccgaaccaccggatacgattacgtttgctttacccagacgaatcaggttgaaggcatccgcaatggcattggtagaagtagcacatgctgaacaagtcgcgtagttagggccatggaagccatacatgatagaaatctgtccggcagcaatatccgagatcatcttcgggatgaagaacggattgaacttgggacctatttccttgtgagtgtagtagttgcctacttcttcctcgaatgtatgtataccaccgataccggcgccaaaaataacaccgattctgttcaaatcttctttttcgacgtcaagaccggagtccgataccgcttctttggcaacagcgacagcatactgagtgtataagtccatctttcttgcctctttacggtcgatatatttagttacatcgaagtttttcacttcgcatgcaaactgggtcttgaattgcgacgcatcaaaatgagtaataggccctgctccactaaccccgttcactagattttcccagaattcgggtacatcattgccaacaggagtaatggcgccaaggcctgttactaccactctttttaattccatattgatgaaatcggataattacttagcgtgttcttcgatataagatacagcatcacctacagtaccaatcttttctgcttggtcatcaggaatagagataccgaattctttttcgaattccatgataagttctacagtgtcaagagaatctgctcccaggtcgttagtgaagcttgcttcgttagtaacttctgattcttctacgcctaatttatcaacgataatcgcttttactcttgatgcaatttcagacataactttaagtttttaattaataattagttttatttctttaaatttgcggtgcaaaggaatgaatatttatcgttttgcgcaaatatttgactaaataaatgcagtcttttgcacatttttcactgttttgtgcattgaattcgagtataatgaagaaaaacatcgccattttcgcttccggttccggctcaaatgccgagaatctcatccggtatttccagaagagcgactccgttgaggtgtcgttagtgctttctaataaaagtgatgcctacgttttggaacgtgcgtatcgtttgaaagtgccctgtaacgtgttcccgaaggaggactggacagccggagatgaaattctggctattttgcaggaatatcgcattgactttatcgtgctggcaggtttccttgtccgcgtgccggatttgcttttgcatgcttatcccgataaaatcataaatatacatcctgctctcctgcccaagttcggcggaaaaggtatgtatggcgacaaagttcaccaagccgtagtggctgcgggcgaaaaagaaactggcattactatacattatattaatgagcactacgacgaaggaagcatcatcttccaagccacctgccccgtacttcccgatgactcacccgaagaggtggctaaaaaagtacacgctttggagtatgagcatttcccacatactgtagaagaagtaataagtaataggtaataagttataggtaataagtaataggtaataagtaataatcgtagttactttggtaccgtacccgttcgatagatatccgcatggttattacctattacttattacctattacctgcatatacgccttcgcttctctcctcaacgggtaatctccccgtaaggtttcgaatagttccggatgggattttaatcggttgctgtcttcgatgggattgtacattttcagcagagcttcttcacggtcttttgcttcgataataggcgaagatggggcgggaggggtgatttcataagttgcgcctaggtggaagaaacggcagatggagtccagcgacattcgggtggcatttgcttttccgtcggcagagtatccggcgatatgtggggtgcctatcagtaccttttctaataatttacggttgatttccggttcatgttcccatacgtcgattactgcgtccgagattgtaccgttgttgatggcttccagcagggcgtttgtttcgatcacttctcctcttgaagtgttgatgacaacaggcttccgttggagagaccggaagaaattctcgtctgccagatggtacgttttatatttcccttccttatataaaggtacgtgaaaggtgatgatatcacattcttcggctattttctctagtgaggtgaaggtaatgtttccttctttctcttctcttggcaagtcgttcagtagtacacgcataccgaaatcctgtgcgactttggccaccttgcttcctacattacctacaccgataatgccgatcgtcagttcgtccggctttttattccgaagagatttccagatcagaagagaggattgtatatactgagccaccgaggcggaattgcatcccggggcattcgcccactcgatacccgcctgcttgcagtattcggtgtcgatatggtcaaatccgatggttgctgtggcgataaattttactttgctgccttccagcaattcgcggttgcagtgagtgcgggtccggatgatgagtgcgtccgcatcctgtaccagtttccgtgtaaaatcctttcccggtgcgtagattacctcttcggcaattttctctgctgcctcttttatataaggtatcttatcatctataataattttcatatacaattccttttttactcagacaaaggtaagaaataaaaaagtaagaaacggttgcttgtctgaaaaatattacatagctttgtcctattatacatctattagctagttaagattatgacatttagtaacctttgcaatgatattttttggaaatcgacgacagattaccatgtgacggacagcgtagatgcgccgatgaacaatccttacgagttgaagtcgatagagtattatttgtatctgaaaaactggattgatgccgtacaatggcatttcgaagatatcatccgtgacccgcatattgatccggtggcagccgtagctttaaagagaagaatcgataaatccaatcaggaccgtacggatctggtggagttgatcgatagctattttcttgatcgatataaggatgtaaagccgctggcagatgctaccatcaatacggaaagtcctgcctgggcagtagaccgtctctctattcttgctttgaaaatttaccacatgcagcaagaagtggagcgtacggatacgacggaagaacatcgtgcacaatgccaggtaaaactggatattctgctggaacaacggaaagacctttcttcggctatcgatcagctgctggctgacatcgaagcagggaagaagtatatgaaagtatataaacagatgaagatgtataatgacccggcgctgaatccggtgctttatgcaaaaaaataacgaatggcgcgtattctcattatccgtttctcggctcttggcgatgtagccatgacgataccggtagtacattcgctggcagtacaatatcctcaacttgaaattactgtgttgagccgtgctgtgtggcaaccgctttttcagggacttcctgcaaatgtgagttttatcggtgctgacctgacgggtaaacataaaggattatgggggttgaacaccctttattcggaactgaaagcaaagagtttcgactatgtggcagattttcatcatgtgcttcgtacgaaatacctgtgtctgaggttccggctggctaatatacctgtggcatctatctataaaggtagagtgggaaaagaaaaattagtccgccgccggcataaagtattggagaaccagaaaagttctttccgtcgttatgccgatgtgctggagaaactgggttttcctgtattgttgaatttttcttcgatttatggagatgaaaaaggaaactttgcagagatagaacctgtcacaggcgcaaaagataatttgaaatggattggtatagctccttttgccaagcacatgggtaagatataccctattgaattgcaggagcaggtagtagcccattttgccgccgatccgaaggtgaaggttttccttttcggaggtggcaagagtgaacaggaagtattcgatggctgggtggcgaaatatcctaccgtcgtttctatgattggtaagttgaatatgcgtaccgaattgaatctaatgagtcatctggatgtgatgctctcgatggattcggcgaatatgcatctggcttcgctggtcaacattccggtgatctctgtctggggagctactcatccatatgccgggtttatgggatggaaacagttgccggtcaatacggtacagcttgacctgtcatgccgtccctgctccgtatacggacagaaaccatgctggcggggcgattatgcttgcctgagagaaataaaacccgaacaggtgatagcgaagattgaaggaataatcaattaggagccaggtactcctgagatatggaacaagaatgaagaataaacttttatataagttgcgtagcgggaagaatcctaagttcatttactattcggtaaatgctctcagactggtcattccgaaaggcattttccggctacggttacaaggaaagttgtcttcactatcccgccggaaggacaaggattatatagaacgtcgcgttgactattataacaaactttccggaacggtgcaattaccttcttctgctccgcatctttcagagcacaagatgagcaaacaaaaagtgtatttctttgatacttatcaatatacccgctggttttctgatcagtttcagtggggcttttgtcccggtgatgtgacatttgttcccgactatccctctattgtgaaaagccgtccgctgacagatgataatgcgaattcgattgtgatgaaactggataaggttcgtcattttatatttgtggaggataagaaggcttttactgagaagaaaaatatggtaatctttcgtggaaaggtaaaaggaaaaccttccagaaagctttttatggaaatgtattttcatcatccgatgtgcgatttgggcgatgtcagcaaaaatacgactgatccggcagagtggcgcacggagaagaaaacgattaatgagcatttggattataaattcataatggctcttgaaggaatcgatgtggccagcaacctgaaatgggtgatgtcatcaaattcaatagcagtgatgccccggcctacctgtgagacatggtttatggaaggcacgcttattcccaattatcattatattgaaataaaaccggatttttctgatctggaggagcggttgaattactatatagagcatgtagacgaatcattggagatcatcagacatgcccatgaatatgtgtcccagtttaaagataagagaagagaaaatttgatatcactgcttgtgttggataaatattttaagatgaccgggcaaaagagttgagagatgaagagaagtatgaccattcttgttttttcgtaagatgaaaataatgattaaccccaaatacgaatatctgagagaatatgtagaacgtattccgaaagattttgagacaataggaacggtaattcattccgggcgaaatttgataaagatgatcacggtggatggattggatattaacgtgaaacggtatacgatacctccactgataaatcggatcgcttatgctttctttcgcccttcgaaagggaaacgggcttttgtttatccggagaaactgttggagaaagggtttgaaaccccatgtcctattgcctatatagaagagacaaaaatgggcttgattggtcattcatattttatgagcatacaatctccctatcgatataatttttgccagtttggcaatgcggatataaaaagctgcgaagatgtagtgaccgcttttgcggaatttacagcgcgtttgcatgaagccggaattctgcatctggactattcgccgggaaacatcctgtatgacaagataggagaggaatatcatttctcactggtggatattaacagaatgcattttggtgaagtggatattaagaaaggttgtgcgaattttgcccgtttatgggggcagacacccttcttcatcttgttgggaaaagagtatgcccgttcgagagggatggatgaagaagaatgtgtgcgtttgattctgcattacagaaagaaattctggaacagatatcgtcgcagacatcaggtctggtttcagttggatatttaatggctaaaggagggtaattaatgatagtagcttttgaaaataatgttgtttgttcggatgaaaaagtgcgggactacttgctggctcatcatgctgacttgaaagaagatcaggatgaggacgcattatgtctggttcgtttgcataaggaggaagacattgatggcactgatcgtgtggacttagtcggatggagggagatttcgagagaactttattgggctggggaacagatggagtgcaattattctattatccgttttagtcggaagactacttctttgcagatgtcggtcgtactgtcaacctgcaaccagcttgaatggctggagaaggtgttgtggggatatgaagcccaggatactaagaactttgaattgattgttgccgatgatggttcgcggaaagaaacttatgatatgttgcagaggataactccgcaattatcctttcaggtgaagcatgtatggcacgaagataaaggattccgtaagtgcgatattctgaataaaggcatactggctgcgcaagcagattacctgcttttcagtgatggcgattgtattccacgtaaagacttcgtctcaactcacctgtgtcttcgccgtaaaggacgtttcctgtccggcggatatcataagttgagtatggatttgtcgaaagatattacaaaggacgatatattatccggcagatgttttgatctgcaatggatgagaggaaaagggatgcctgcctcttttaaaaataataaactgactgctacaggatttaaaaggtgggcattaaatacatttactcctaccaaagcaagctggaacgggcataacgcttctggttggctaagcgatattctggcagtgaatggttttgacgagcgtatgcagtacggtggacaagaccgtgaatttggagaacgtctggagaactatggaattcatggtatgcagatacgttactctaccgtatgcctccatttggatcatgcaagagggtataagacgaaagactctattcagaagaaccggaatatacgaaagcatactcgtggagcaaaggttcaatgggcttctctgggcattgtaaaggatgaactgagaggtcagtctgtgaaggtgaacagttattatgatcgctatatacgggaagaagagaagctgacttcctataaggaaaaaggaggattttaccgacatatctattctttgtcttgcaggtggagaagagcaaagtatcatgataaagtggtgcgtgcttatcagcaggacactgatgctccggcattatcgaaccattcgggagtcattgtctcgttgacgacatttcctccccgtatttcccagcttcatctgatgttgaaatcaattctgtggcagacttgtccgcccgaaaagataattgtatggttgtcggaacaggagttccccggacggttgaatgatctgccagaagaacttaaaatgttgatggctaaaggaatagaattcagatttgtgtctgagaatttccgttcacataagaagtatcattatgttttccgtgaatatccggatagtaaagtgataacagtggatgatgatctgatttatccccggaatacggttgagcgtttgctttccttatcgtatcagtatccggatacggtttgcggaaacgttatccggaagattcatatggatggaaattctttttcggtatatagaaagtggacgaaagtgtttacgatgccggtgaatagttctttgcagaatgtggcaatcggatgtggcgggatttattatcctccccattggtatggagaggagttgtttgactggaaaataatcagtgaacattgtccgtctgcggatgatttatggttgaaagcgaatgaattaaagaggcgggtcaaggtgacaggagggggtgaattctatccccggccgatagagctgcctcaaacgcagaataatagcttacaaaagaaaaataatgggaaaactaacctgaatgataaacagtggaaatctttgaatgaactttggaaactagacgaattatactgtataaatggcaaataagaggtaattgtttgatttgagagtgtttagattgtattatcgaatcacagacaagtgtgaaatttatttaaaatcgagggtagttttgcagtattccttgttatatagcattctatatagaaggggctgcagtaaaaataaaaagttgacaagtagaataatatgaatactaatatctctggaccattgattagtcttatagtgcctgtttataatgtaaaggactatttgaagacttgtctgcaatctatactggagcagacctataagaaccttgagattatcttagttgatgatggttctgacgacggctcttccggtatctgcgatgagtatgcgcgtatggatcagcgcattaagactattcatttgcctcatagtggggtgagtgctgcccgtaatgctggtttggctgcagctacgggagagctcttgggctttgttgacagtgatgactggattgatcatgatatgtatcagtatctttacgctttgatgcaagagcatgatgcagatgtttctgcttgtacttatcttcttgagcaggagggaagaccttctaaaataatcaacaacacgggtaagttatatgttttctccagaaaggagattatacgtgctttggtaaagaatgacttggtaaagaactatttatgggcgaagctctttaaacgtaaattgtttgaccgcctttcattccctgtcggacgggtttatgaggacgtagctgtattatataaagtattttatagctctcagaaagtggtattgagttgtgtctctaaataccattatatgattcataagaatgaaagcattactcgtggtggttatgatccggtaaaggaatatcattacttcctgagtctttatgaacaggataagtttattcagaatgcggaacttggaggtgaatcttccgttggcgtacttaagagagggattcatttgattaaccatactttattgtgccctccgtcaccggcttttgaggatatcatagatgaaacgatgttgaaaatgcgtgaatatcgtcatattactccttggcaactaggcccgagtatgtcaatcaaacgatattttatgtgtaaacacttcggtttttataggatgctatatcgtggttatcgtgctatatttaagagaaagcacaaattgttgattgactagaatgactaaggaaaagatagcttttatagtagttcgttatggaaaagatataaacggaggtgctgaatatcattgtcgtatgctggccgaaaggctggttaacgattatgatgttgaagtattgactacgtgtgtcaagaattatgttaccggtgataatgaatatcctgaaggagaagaaatcctgaatggagttttggtacgtcgattctattcagatcctgttgaaccggacttacataagagctatgtcaggcaggcggctccggcaaagaagtggaggcacttcttgtacagatgtcgtcttttgaagcctttgtcttatgtgaaaccgatttggcattataaagaacaagaagaaataaaggccttgaatagtcaggttttttattcatcttcaatgtatgcttttataagagagaataaagcttcttatagagcattcatcccactttcctttttccctcatacttattatactgcactatatgcaccggagaagacgattctgattcctactatgcataataacggttcatcctttcgttctattattacttctgttttctctgaggttgcctatattggatttaatatagaagcagaacagaaattggtagagaatatagttggaaagcctttggctgctcacggcattataagtgtaggtatagagaagacaaaagctgctgattgggagcgaacaaaggtaaaatataatttgccggaagattatctattgtatgtagggagaattgatgctataaagttgaataatatagttgattactttttaagctataaaaagaaatatacaggttctcgattaaagctagttttagtcggaggcatttttggaaagacagtcgaacatccggatataatttacacaggttttgttgatgatgcggagaaagtagcgattcagttgaatgctaaagtaatagtgaatccttccagatatgaaagtttatcacttattttacttgaaacgatgagcgaaggtaaggcgatgttggtcaatggcaggtgtaatgtgttgagagaacattgtgaaaagagcaattatgcagctttgtattatatgagtcgtagagattttatgcgaaaattacataaccttgagaactcagaaacattacgtcaacagatgggagagaaagggcgtcactatgttcaggagaattataattgggagatgattataggacggatgaaaaatgtgattcagatgctctcataagtagaatgttgtattaagggaagctatgaagaaagagaaagttgcttttgttgttgtcagatatggcaaaaatataaatggcggggctgaatatcattgtcagatgttagcagaacggttagtatctgattatgatgtggaagtacttactacctgtgtcagagatgttgcgacaggtgaaaatatatatccggaaggtgaggaagaatggaatggagtggtgattcgtcgttttaggacgaatcctgttcagcgtgaaaaggaacgctatttcgcaaagaaggctaaaccagcaagaaaactacgccagttcctttttaaattaggaatcttgaaatacttgtcttatttgattcctgtatggtcttacaaacatgatgatgaggtacaggcgatgaagagtgataaattctattcgtccgcattgaatgattatattcgtgatcatatagatgaatataaagcatttatagcaatgtcttctgattatgtcaccttttattacactgcattgtatgcaggaagaaaaacaatagctattcctacaatgcataatatgggtatttctttccgttctgtattaacatctgctttttcaaatatagcttatgttggttttaataccggagaggaacagaggcttgctgaaaatattctgggtaaggctttgggggctcatgggatattgagtgtaggaatagaggagtctttatccgcagattgggcgatgacaaaagaaaagtttcaattaccagagaaatatttgttatatattggccgtattactcctaaaaagattcatcgtttacttacatattttgtgaattataagaagaaatattcagattcaacattaagattagtattggtaggtgggctggctatgaagcgatttgagcatcccgatgttatatacacaggctttgtcagtgatgaagagaaaatgtcaattctacagcatgccgaaattgtagtgaatccttctcgttatgaaagcctttctttaatacttttagaggctatgagtcaaaagaggccaatgcttgtaaacggacattgtaaagttttgaaagaacattgtttaaaaagtgattttgcttctttttattatatgaataatcgtgggtttaatcaagcacttcgccggattgaacaatcggaagatttgagagaggagatgggagaaaaaggtgcatcttatgtggagagtaattataattggtctcttataatgggaagattgaagtcagatattaattttataaaagaaaatgggaaaagataagatagctttcgtagttgtccggtatggggcagatattaatggtggagcagaatatcattgtcgtatgctggcagaaagattggtagatgattatgatgtagaagtgcttactacttgtgtgaaagactatatgaaggggggcaatgatattgcagaaggggctgaatatataaatcgtgtaatggtacgccgttttaaggttgatccgattcgggatatgtcagagtctgagtatttgaagagagctaaacctgtacggcgtttaagaatgtttctttatcgaattcgagggttgcggttgttctcctattttataccagtttggacttattatcgacaagaagaactggaatctatgaggagatgtgtcttttattcgtcccagttacatcagtttataaaggaaaataaggatgtttataaggcatttattgcattgacaatagactatactccattttattatacagctattttagcgggagagaaaagtattgcgattcctacaatgcactatacaaagatatcttttcgtggagtgttgactgaggctttttcaaagtttgcatatgttggatttaatacgaaagcagaacaaaagttgggtgaacgagtgtttggtaaagccctcggggctcatgggatcataagtgtaggtattgaaccaataaaagcggcaaattgggaagaaacaaagaggaaatataggcttcctgataaatatctgctttgtgtcggtcgtgtggagaaagccaaggtcaatgatcttataacttgtttttccaactataagcagcaatataaggagtcttcattaaagctggtgatggttggtggtatatttggaaaagttcctgatgctgctgaagttatatatacaggatttgtctctgatgaagaaaagattgctattattcaacatgcttttcttgtagttaatccttctcaatatgagagtctgtctctaatacttctggaaacgctgaatctggagataccgatgcttgtgaatgggcgatgtgctgtactaaaggagcattgtaaattaagccatggtgccgttgattattatatgaatgaacagcaatttattcgtaaattgaataagatagagagttttcccgtattcagagaacagatggcgaaaggtggaaaacaatatgtggataataattataactggaatttgatcttatctaggctaaaacgggttatagaattagttgcaaaatcaaaacagaggaaataggttattatatagactctctctcaagcaattatttataggatttgagaaatatattaattagctttttgatgagttttcttgtttttcttttttgatgtattaaaaggaacaaacagcatttacttttaaataatattgttttactatgggtgatttgtctaattaaaggaagcagtttatacaattcactatgggggtaattgggcgatagagaggatatttccgtaatagttagtaggagcctttcttttagagttaatggggatgtttggtttttgctggtataatatgcctctaaccaattaaaaaaatcaattgtggctatggcttttcttttttgtgtggagatgttatatgttgaagatatatttactccactatccctccaaagaactttagccttttctatcgagaaaatacctttttcttcggcgcataccaatactgttgcattgtctgatctgtatgcaagatcaaactttataaatctcccagtttcgttaaaatgagatgtcctaaaaataaattcgggcattctagcgtctatttgataagtgtatatgagacggataaattcggatgcagataaaatctgaggatattcattacaatgttttgtgatattttcatgttgatcaataatatctatattgtagtggtagacatcatatatatgattacatgcgagcgcttgataaaacatttctacacaatttgcctccattatatcgtcatctgaaaagagaatgaagtactcttcattctgtatcatgtctaggcacctttcccattgtgaaataagatcactttttcctcgattgtcggaaaatttcttatatgtaatatttagtagactgatatattggttgatgatgtcaggtagattttccgggctgcaatcatcacctatatatacagagaaatttttatttgtctgttgcactagtgagtctaaggttcttttgaggtaagctcctttatatgctggaatgataatagctaagttctgatccatttatattaaaatataatttattgctgcaaagatacaaataattggctataaaaggtctttgaaagccaaaaagggcttgagtaggattatgcttgtttggatggaatatcatttagttgattaaacgttgtatcttatttgttttttacattacttttgtaagccaatatagtttgagataaatgtgagtcaatggtacgtaatatgaatgatatgaattctctatatagtgtaagcgttattattccggttcataatacagctccatatttggaacgatgtgtagaatctgtgagaaatcagaccttaaaaaatattgagattatcttggttgagaataaatctcaagataattctccggtgctatgtgatgaatatgcaagaagagatccaagaataaaggtgctgcatctttcgatagctgggttatctatagctagaaatgccgggcttaaaatagcctctgctccttatgttggttttattgatagtgatgattacataagtgaaacaatgtttcaggacttattggatgccattagtagtagtcaagcggaaatggcttattgcaacttctgttatgaatatgaggatgggaaaatagaaactgtttatactgactctgggcatacatgcatacgacagcctaaagaggttattgaggatatcatatgtgaaaaagtgagtagttcttcatgcacaaagttatttaagaaagaactgtttgcttctcttttatttcccgaaggagttttttttgaggatcacgcagtactttataaatgggtagctatgtgtacgaaagttgtatgggttgataaagtctattattattattatcagagggatggaagcatctgtcatactctcgatatgaataagcattatcacttttttatggccgaatatccgagattagattttgtgaaagagaagaggctgttttcagagaaagagcgcggagcgattattaaaatgattgctcaaacttgtttttatcacttttcagattttatgcaagaagctaaatttctaagggatagaaagcagattaaagatatgagagttcggatgcgtaaatggctctctttaccttcagatgaaatagacaaaaagttgtataagaggataagaaagattacttatttctggccaatttattattggaaacattatgctcgtaaaaaaagagagtaaggagggttgtgtcaaaacgttggcacaaccttataattttttactaatttccaatttaaattcagaagttttctatttgcataaaatgggacagtacctatttctacttactaaatacataacctctatgtccccaatactcattctcccacttacttatttgcatttgaacttcttcccatgaccaaacataaaaacgatcatttaaaagaggcgaatacatttcataaataggttgtgtattagcttctggttctgataatatgtaacctctaagcccccaattctcatttttccaatcatttatttgccattgaacttcattccaagaaaaggcataaaaccgatcgttcatcgtcggtgcgaacatctcatagataggtattgtatttactccaggttttgctaatatatatcccttaaatccccaaaattcattattccatttatttatttgcatttgaacttcatcccaagaaaaggcataaaatcgatcgtccatcgtcggtgcgaacatttcataaataggatttaattgtaaaactgacaactgactgtcatttatatattttatcactgctttttttacctgttctctctttactggatcagaaataaattcataaatagggtatgctttatcccagtttatttttgttaaaccagcattagcagcagttactgatttttcccatgagtatttatcaatagtaggataacctgtttctaaattatatgttccaccaactccgtcaccgcctttgtactccaaatgtaaagttcggtttatgttctccgcactagtcgatacattctctattactgttttatccacgtcagcactcaatccgatttttgctaatactcctttcaatccagcttttataactttcgtttttttctcttgatcatcttcctttattatgctggaactatacatgactcggaggacacccccaattgttatatctgctaatacatgtgttccataatcttttacgaactgttcaggggatgtcatgttagaaatatccctcttgaatttgtcagtcaagaaatttgataacacatcgacactctcagccaatcggagccatctcacgtctttgcagatatccgcacttgcataagaatatttggtagataattcatgccttgtgaaattttctttagagaaagaacctgtaaaacttaaatttcctttgactattggtatactatcacagctaacagaggtattaacacctgttttttttgtaatttcttttatatagtcatacgaagtgtaaccatagtaatattggttctttccgctaacttcattgctggtgatgatgctgttcttatcaaactcacgcaattttacaatatcaattacagagtttctaattgaatatttgtctaaataatcacctgtaacatcatatccaaaacccaaagcatgatcgtctgtatcaagtgatctagttgttaattccttattctcattttgtgtttgctttgtagaatcatcaaattgttgaatctcgtctgaacaagaaattagtaacaagataagggaaagagcgcataatttgtttttcataataaaagtatttaatttatattttgcccaataaataacattc

SEQ ID NO: 4568 - DNA, 29336 bp, Unknown
  gut microbiota DNA sequence
tacaaactcccaccgcgcaaagtactgcgtactcccgaacaactggaaggaatccgtgagagtgccaaaatcaatactgccctgttggattatatttcggagaatatccgtgaaggaatgtcgactgaagaaatcgatgtcatggtatatgacttcactacaaagcacggtgccatccctgctcctcttaactacgaaggatttcctaaaagcgtctgtaccagtatcaatgatgtggtatgccacggtattcccagcaaaacagaaatactgcaaagcggagatatcatcaatgtagatgtttctaccatttacaaaggatatttctccgacgcatcccgtatgtttatgatcggtgacgtaagtcccgaaatgcgcaaactggttcaagtgactaaagagtgtatggaaataggtatagccgccgcacagccttggaaacaattaggagatgtaggcgccgctattcaggaacacgcagaaaagaacggattcaacgtggtacgcgatctttgcgggcatggtgtaggaatgcagtttcatgaagcaccggatgtggaacatttcggacgccggggaacaggaatgatgatcgttccgggcatgacctttaccattgaaccgatgataaatatgggtacttatgaagtatttgttgacgaagctgacggatggacggtatgcacggatgacggactgccttctgcccaatgggagaatatgattctgattactgaaaccggaaacgaaattctgacttattgatggaactgattctacttattgttattgccgcattagcagtaatctcgattgtactatcactggcaaaaggaaataatcatgcgcaagcggaacaattacaggcagccttgcgccagcaaatgcaagagaaccgcgaagaactaaaccgcagtatccgggaacttcgcatggaaatgacccaaacgctgaatcagaatatgcaacaattgcaagacgtactgcataagaacatgatgacaaacggggaactgcaacgccaaaagttcgacacaatggcacgccagcaagaggtcttgataaaatcgactgaaaagcggctggatgatatgcgactgatggtggaagaaaaattgcagaagacattgaatgaacgcattggacagtcctttgaaatcgtccgctcacaactggaaaatgtacagaagggactgggagaaatgaaatctctcgcacaagacgtcggtggactgaaaaaagtattgagtaacgtaaaaatgcgcggtacattcggtgaagttcagttaggagcattgctggaacagatgatgagtccggaacaatatgacgccaatgtgaaaaccaagaaaagcggaactgaatttgtggaatttgccattaagttaccgggtaaggatgatgcgaacagcactgtatacctgcctatcgatgcaaaattcccgaaagatgtatatgagcaatactacgacgctttcgaggcaggagatactgcattgatggaatcatccggcaagcaactggaaacaaccatcaagaaaatggcgaaagatattcacgataaatatgtagacccgcctttcaccacagactttgccatcatgttcctgccttttgaaagcatctatgcagaggtgatccgaagaacaagcttggtagagacgctacaaaaagaatataaaattgtagtaacgggaccaactacccttggtgctatattgaacagtcttcagatgggattccgcacgctggctattcaaaagcgtaccggagaagtgtggacagttttgggagcagttaaaactgaattcagcaaattcggaggcctactcgaaaaggtacagaagaacctgcaaagtgccggtgaccaactggaagaagtgatgggaaaaagaacccgcgctattgaacggaaactacgtcaagtagaacaattgccccatgaggaaagtcagagaattctgccgatagcggatgacggggatgatgaataaaacaaaaattatagaccttttaagatggtgtcgctatccggttgggatagtgtcaccatgttgattggatggtgtcactatgctgattggatagtgtcactatgctggctatatagtgacactatttataaactaattagttatcagttgaataattaatcttcaatgcactacattccctcagcacctgcttggtatccgtcacgtatcccatcttacaccctttctctatcttgaggccaataaccaaactttccggatcagcttgctttgcacgtgcagcagtgactttctgtttcaattccgttaaagtataatctttcattacttccttcccttccgaagtgtgaattgttaccacaatcccactgattttctcctccattgacagctctttcaatccataatttctcgtagcaccttccgacagtagaacgggaaacaatcggtccaacgcttcttcacttttatctgtcaatgtaatagacaaatcagcacgaatttgctcaaatgctccttttacttctttgagtatagtagtgagtgcagcaatttcacttccgcgatcaacctgaaaagaaataacttggtattctttcctcttactttcttcccaggacttcgtcaaattcttcacaatagtagacttcaactcatccactgaacatacatcattatcgaacatcaccctattttgtttattaacaaaaagggagtgaacctgtcttgctttaatcttagagggtggatacgctccattaaccagcttgctgtatctctctcccccttctttgaaaaaaaacatcaaagatgaataatcatccgcttctttctgctgaagttcagactgaatctgtcgcggaacttctttcacttccggctgtgcaaacacataaagcgctccagccatcacaggcacggcaagcaacagctttaatcgtgcccaacgattggttctttcttttaacatcatagtgatacgttttttaagtttagagtgattaaagccattagccatagagtagagccttgtaccaacagcttttttcaccagtaataattgatatttagttgcatcgatgcctgtattaattacgccattatcggcttcaaattcatgtacttcctgcaactcccgttttagtagccaaacgacaggattaaaccaataaacaagcaggaatatctgcataaacaataagtccaaagtatgatgatttcgtaaatgcatcgtttcgtggaggagtatttcttcggactgttgagagtagtcagctgctgaaataacaatatatttaccccagctaaatgaagcagttggctgctgaggaatcactaatacatagtttccaaactgttttttctctgacgtacgaatcaactgaatcaaacgacaagtggacaaagacaaccagatcagtgtcaccaaagcccccactccatatataaaagctaaagtcacaggaatccaattcaaagagtttatttccggattcttttcagatataagaataggatcttccatctgttccggatttagaatgacagactccgtactttgcaatatctcgtgaatggcatacaacggactatgcaaaaaagtctcctcggtagttgtcagctctataagtggaagcaaagtacatcctaacaacccaaccaacaaagtgatgcggttgaaacggaaaaaagtactccggctcatcagcagcttaaagaaaatataaaagaccactaagcaacatccggatttcagcagatagaataaaaaagctcccattgtgttttcagattaaaagttgtttgtccatagaataaaaatcgtatctgtccgatagaccagagagagattacttcttctttttactttgctctatatactctatcagcgattttagttcatcaacagacatcccttcttcttcaataaaagaagacactacattgatataggaattattataatactgggaaaccacttctttaagtgccgaactcttatactccttttccgaaacaagagcataatattgataagtatttccgtaggctttataccccacaaaacctttctcctccagccctcgaacaagggtagaaactgtgttataatgcggttttggttcatcatagaatgatagaagttcacgaacaaacataggtccatgttcccaaaatatacgcataatttcttcctctttgacggtcaatcgtttcatctgtttcatagtctacatatttattgttcttccaatggcacaaatataatactatttttcaaacaaacaactaacactattagttaatctactaaataaagcagttgtttaactaatattattagtagatatcattttcaccttatattatatatacaataaaaaaggcatatcgcctgatgaatatccgatatgcctgcccgactaatctctagttattatttccgctttcggacaggtaatactatcctgagtacaatgtatcctaataatccggaaagaatagtccccgatagcactccgaacttagcctgattcaacagaacagggtagtttgcaccaaaagaaagattggcaatgaaaagcgacaccgtaaaaccgatccctcccaacagagctataccggaaagattcttccaagtcatacccggcggcattggagtaagttttatctttatagccaaccaggtaaagaaataaattcccgcaaatttaccaaacagcaaccctgctgccactgccatccctacacttcccaccaactcaccgccgccactaaagacaacgcctgcattgacaaaggcaaacaacggaagaatcagataattgacagctccatgcaaattatcctccaaagactgcagaggactgataacacggtcggaagcagattcgacctctttcagtttggcaatctgctcattagtcaatacgatacttcccgattccaccaccgggaaacctgcaattgtatgacgaatatgctcgatatattttccgacatctagacggggtttcgccggaataacaaacgccagaataactcccgaaatggtactatgaataccggattgcaaaaataaataccatataacgacaccgatcactaaaaagaaaatcttattggtagtcccacgcttccctataaaataaagtaaaacgtaaagcaatgcggctatcagaatatacccatacgacacatgcgaactataaaaaagagcaattacaaggatacctccgatatcatcaactaccgcaaaagccgtcagaaatatcttcaggctcaacggcacacggcttcccaacagacttaatacccctaacgaaaaagcaatatccgttgccattggaatggccaatccctgacttcccgcactgcccggaggacagattgacatataaacaatcaccggaaacagcataccgccacaggcagcaataaagggaagcgccgccttgcggaaggaagaaagctcaccaaccaacaactcccgtttgatctccaatcctaccagcaagaaaaagatggtcatcaacccgtcattgatgaactcgatcatccgcagattctctccgccatgcgaaagcagattaaaattaccgatctgcaaatgaagttcatgcaaaaggaactcctgataaaccggagcaaccggagaattggctatgatagcagccgctattgccgctacaaacaaaaggatactcgccgcaatattcattgacgagaaatttcgcattgtacgcaaaattgtcataatgaaaggtgtttatagtatttgatccgcaatatatggatttttttaatcattatagctccttaaagccaagtttttcacccaaaggacaaatattcctgtcagaataagattcaacaccaatgtaagtacggaaatgaccagtgccggaccgccgagattataacccaatgcaataaatataattccggcacctacctcaccgcgggtaaacataccaatggaaagtgccagtcgctcactcaacttccggtcacgatagaagaacatcggacaaagtttgcctatattcgataagaaagagactatgacaacatggaacaaaatcattccccaggacatcatctcctgcgaacctgtcaccgaatgcgttcctgtatgagtttccgcaaagttaactccgataaaatgaggcatactcatacctaccaagaacataaacaggaaggagattccagtagagacttttcgttctacaggagtatcgtgctctttatgcttcatgatcatacccaatacaaatgccggcaacagaacttcgatatggatacttccttcttctccatacagctctttactgccgagataaagtatctgcgtagccagaaatatgataacggaatagaagagaatagctttccaatcctgccgccagttatacttattcagttgtttccatccaatggacaacagcataaatacaataaccaccacaataatcagctgccaacgcaaaccaatcatcatgatctgaagagggatcatcaaaagaatggtatccagatcatcaaaaatagccaggacctgaatcttcttatatatccagctggactttaacccgatagccgccagcatcgtaaacaagatgccggccgacgtaggtgcggcaaaacgacttagtaacagattctctttccaagcctcccaactattccagtaatcaggcggaagaagcacgaatacataatagatagcaatcatgaaccaaggcagggcagctgtagccatcgctataagataatcctcggcataacttttccagcggactttgtcgagcacaaactcccgacccacattaatcattataaaactaagacatacataaagtagtatattcgacaggaccttaacagttccatatccttctcccgctatcatcgggaggaattgtgaaatgacgagccccaacatcaggaagcccgaaaaagacagaacttttctcatatttatagttgtttgtttcaaaaaaggtgattgccaaggaaagctctgcagacagaagacaatcacctggtgtattaaaaaactaaccgcaagccgatttgttcagaataactctctgaaaaatcgcttgcggttcattttttaatccagcttcagtacggcgaggaaggctttctgcggcacttccacattaccgatttgtttcattcgttttttaccctttttctgcttttcaagcagtttacgtttacggcttacgtcaccaccataacacttcgcagttacatccttgcgaactgccttaatagtttcacgagctataatcttagccccgatagctgcctgaatagcgatttcaaactgctggcgagggattaattctttcagtttctcacacatccggcgtcccatatcatacgcgttatcgaagtgaatcagcgtagaaagcgcatcgaccggttcaccattcaacatgatgtccagtttcaccaacttggaaggacggaaaccattgggatgatagtcgaacgacgcatatcctttcgaaatactcttcaatcggtcatagaagtcgatcacgatttcacccaaaggcatgttataatatatttccacacgattaccggaaatatactcttgtttcaagagttctccacgtttccccagacagagggtcataatcgggccgatataatcggtagtcgtaataatagacgctttgatataaggttcttcaatatggtcgatcaacgtcggatcaggcataccaccggggttatgcacttctttcatattgccttgtttatcatatatattataagatacgttaggcacggtagtaatcacattcatgtcgaattcacgatccagacgttcctgtacaatctccatgtgaagcaatccgaggaaaccgcaacggaaaccgaagcccagtgccaatgaagattccggctggaaagtcagcgaagcgtcattcaactgcaatttttccaaagaagcacgcagatcctcaaaatcttccgcctcaatcggatagactccggcaaaaaccattggcttcacttcttcaaaacccgcaatcgctttatcacacggacgggcaacatgagtaatggtatctcccactttcacctctttcgaggtcttgatacccgatataatgtaacctacatcgcccgtacgaagttcgttacgtggaaccagttccattttcagtacacctacttcatcggcatcatactcttttccggtattaaagaacttcactttatctcccttgcggattactccattttcgatcttaaagtaagcgataataccacggaaggagttgaatacagagtcaaaaatcaatgcctgcaacggagcttcctcatcaccttcgggatgcggaatgcgttcgataacggctgcgaggatttcctccacgcccattccggtcttaccggatgcacggataatctcatcacgcttgcagcccaacagttctacgatttcgtcctctacctcttcgggcatggcacttgccatatcacatttattgataatggggataatttcgagatcatgttcgatagccatatacagattggagatggtctgtgcctgcactccctgcgatgcgtctacgataagcagcgcaccttcgcaagcggcaatggaacgggatacctcatacgaaaaatccacgtgccccggagtgtcaatcaggttaaggatatacttttcacctttgtagttgtactccatctggatagcgtggctcttgatggtgatacctctctccttctccaaatccatatcatcaagcatctgcccgttagtcacctgaatagtgttggtaaactccagcaagcggtctgccagggttgatttaccgtggtcaatgtgggcaatgatgcagaaatttcgtatattcttcattctgaattcttattattttgtctttttggtgtgcaaagatacgtaaatggcggaatataaaaaaatgcgttgataacattataatcatgtaccaacgcatttttttattgcttaagtgagttactcgcttagatcaatttgatgaagagttcaccttctacttcttcagcagaaactttatcttctctcaataaccagccaaggccgaggaacaaatctttgtcaaccaatttagttgcttttttcagttgcttggcagtcattccttctgtttcattcagtgcattccagatattacctgcgattacacctgctttttctttcaacatttgcttttgaaattatagttagacatgctttaaaaatcatccggcccgaaagctttcagattttatttcggggacaaagatagttatttttatgttatataacactttattgaatctttttttgctgattttgtaataaaaaagcattttatccccttatttagggtgtttttcgaggtattctacccagattcttgccgcttcttccaccattttagcacacggacgtttgctataatattgagtattacgttcttcgggaacagtcgaaatcggctcttttttctttaatcccaacaattctccgcaaatcaacgacccgttgcgttttttaaattcggcagccaattcctgcactaccgcatagtttgcagcttttccttcacgatctgtcgcttcggtagctccggtttccagtccggctatcaggaacagtccgcaagcagccccgcatgtctcacgcatccgcccgattcctccgccaaaagaggctgacatacgcactgcctgctcctgtgtgaaaccatacatatcggcaaatgcagctactacagactgcgagcagttatatccgctcttaaaaagttctacagctttttgtattctatcttccatgctattttctatttttattctatttccaaagccattggacaatgatctgaatgtacggcatcgttcagtatgctggcacttttcagcatcggacgtaccggctcactggtcatgcaatagtcaatccgccagcctttattcttggcacgcgaattaaaacgatagctccaccacgtatactcctgtttctccggatagagcagacggaaagaatcaataaatcctgcagaaaggaaacgagtcatccattcccgttcttcgggcaggaagccgctgttcgtggcattccggacaggatcatgaatatcaatcggctcatgacagatattatagtcaccgcaaaggataaggttcggacgagtcttgcgcagctctgtcacatatttctgaaagtcttccagccacaccattttaaatgcctgccgttcgtctccgctcgttcccgaaggatgataaacactgactacggacaagtcgccaaaatccgcacggataaaacgcccttcattgtcataagcttctatccccataccatattccacatgatcgggttcctgcttagtaaggatcgccacaccgctgtatcccttcttttgtgcagaatagagataagccttgtaacccaaagcttcaaatacttctgccggatattggtccggctgtagttttgtctcttgcagacaaagaatatccggattctcctgcaccagccattccggcaaacctttagaaacggcagcacgaagcccgttcacattataagtaataatcttcatcattttatagtttatagatttatgttcgttttatgaaaacagcagcattatattcaatgccgaaacaatgactgcaatagcatataatacaaaagtactccaacggctattgacataattccccattacctttcgggatgaagtcaaccctacttgcaggaataccgtgaaaggcaactgaatactcaatatcatctgcgaaatcagtaatcccttgaatggatcgccaataaagaaaatcagcaacagcgcaattcccaacgaaaggattactcctacctgcgagtgactgtctttaatatgatatgactctccaaagatacctgcaaagatagaacctgccgccattccgcttgttatagtggacgaaatacctgccatcaacagagccaatgcgaatacgattgccgcattacttcccaacaaaggttcaagcagtgatttggcttgttgcaattcttccacctgaatgccgcttttaaagaaagtagcagcagccagcagaatcatagcactgttaattgcccagccaacgatcatcgagaaaagcgtatcgaacaactcgtatttcaatactttcttgatagacgcatcgtctttcttattatactcgtgactctgtattacttccgaatgcagaaacagattatgaggcatcacaaccgctcccagcacactcataataatcagcatactacccttcgggaaagcaggcgtcacccaacccatcgtcgcagccggccagtctatttctaccagaaacaattcataaataaatgaaagaccgatcaccgagacaaaagcaataatggaacgttctatctttttataggagttggtaaagagcatgatggagacaaaaagtgtggtcagcaccgccccccacataataggcatatcaaacagcatctccaatgcgatggctcctcccagaatctcagccaatgaagtagaaatagacgccaataccgccgtacccaaaataggacgggatacccatttaggagtatatttcgtagcggcttccgaaaggcaaagccccgtaacaatccccaagtgagcaacattatgctggaggacaatcaacatgatagtggataaggtgaccacccaaagaagtgaatagccgaactcggaacctgcggcaaaatttgatgcccagttgcccggatcaataaatccgacagttaccaaaagtccgggaccaatatatttaaaaacatccagtccgcccagataacgtttatgatctttccgttttaagtcttgaaaaatattcttcatcattgcataatagtttattcagcacaaatatacttataaataacgaccgaaggtcgattttggttcaaaataccgacaaatagggaaaggtacggcacaataaaaaacctccggcaaaatgaattgccggaggccagtgtatattttataaagggagacttccgttaatatcccatttcatgcagtgcatggcacaactgatcgggacaggacgtcggtctgccactgcaacgtactccttcaagtttcttgataacctcttctaccttcattccctttaccagacgtgaaagtccttgaagatttccgttacatcctccccaaaaggcaacttccttcacaactccatcttctacattcagttcgatgtttgtgctgcaagtaccctgggttctataaacatattccataatccgcttactcctcgtttccgccttcttccggcttcatgtttgtataaacagtctgcacgtcatcaaattcttcaagacgttctatcatcttatccaaagtttcgcgttgttccggagttacctctttcagatcgttcgggatataagtaaaatcaccgccgacatcctcgaagccacactcttcaagatgtttctgaatagcggcatagctcttaggatcaccgtagatagtgattgttccttcttcgtcatcctgttcgtactcatcttctacgtcgtaatcaatcagatcaaggatcagttcttccatatccatgccgtcctttatcttgaaagtgaacatacatttatggtcgaaaaggaaagccaatgatcccattgttccgaggttaccaccaaatttattgaatacagagcgtacatcggctaccgtacgagtcgtattatcagtcagcgtatctacaaagacagcaattccgtgaggaccgtatccttcgtaagtcatgctcttgtagtcgctctggtccttacccattgcattcttaatcgcacgttcgatattgtccttcggcatattctcacgcttacaagtagcgatgaccgaacgcagtgtcgggttattttccggttccggaccacccgccttcacggcaatagcgatctgtttacccagtcttgtaaatgttttagccatgtggccccatcttttcagctttgcggcttttctatattcaaatgctcttcccattggtttgtattaattttgaattgtgaattttaaatttatctcaattttgcattcagcttatcttccagattcttcaccagtttagacatgatcttatcgatcatcttatcgttcagcgtctgagtttcatcctgaagcaggaagctgaccgcatacgatttcttacctgcttcgatgttcttaccttcgtatacatcgaagagttccacttctttcagcagtttcttttctgtatcgtaagcgattttttcgatttcggcaaactgtacgttcttgtcgagcaacaatgccaagtcacgcttcacagcagggaatttggaaatttccttgtagctgatcttcactgaacggatagccttcatcagttctttccagttcaagtcggcataatacacctcattatctatatcgaatgctttcagcagtttcttcgtcacaacaccgaaagaggcaagacgcttcccccccttggtatgaacagaaagtgcggtagcgaaaatatcgtcagtcagattgccaactaccaggttgtgcaaatccagtcccaggcgcttcaatatattctctacataagccttcaattcgtataccgaactgttttcatccgggtgtgcccatgagttggctactttctttccagtcacccacaaacccaagtgatagtcttccgaataggtagccagtactttttctggattcttcttgtccgcatcgaagtaatagcaattaccgaattcgaagaatttcaaatcggcattcttgcggtttgcattgtgagcgatgctttccagtccaccgaacagcaatgtctgacgcatacagttcagatcggcactcagtggattcagcagcatcaccagatggttggatggatagttctccagaccgtcgtagtaagcggcacgagtcagagaattattcagtatttcattgaagccacagccaaccaactgttctgcaaccagattctgtaatttgtttgatttatcatgctcacccttggttgtcagactggagttcagcgtagtcgggatttctacattattatatccgtagatacgtagaatatcttcgatcacatcgcaatcacgctgtacgtctacacgataaggaggaacggctaatgtcagtccgtcaactgtctcattcatgattttcatttccaggctggtaacaatgctcttgatcgtttccacgggaatcactttaccaatcagcgaatttactttctcataagaaagttctaccataaagtcttgtggagctgcaacgcaaacatccttaatttcggatgagatagtgccaccggccagttctttcaccatcagagcagccagtttcagacaatagattactccgttcggatcgatgccacgttcgaaacggaaagaagcatccgtattcagaccgtgacgacgggcagtcttacgcacccatgtaggatggaaataagcgctttcgataaatacatctgtcgtagcttccgtagaaccggaatccagtccgccgaatacaccggcaatacacatcgcttcttctttgttgcagatcatcagatcgcgttcgttcaacttgcgttccacttcatccaatgtgacgaatggagtgccttccggcaatgtcttgacaattacttcattgccttttatctttccggcatcgaaacaatgcaatggctgaccgaaagcatgaacgatataattagtaatatccactacattattaataggacgtacaccgatcaggcgcaatttattctgcaaccattcggggctttccttcacagtaacgcctttcaccgtaacgccggcatagtgaggacaggcttcgctgttttcaaccactacttcgatatccaaatcatgattttccaccttaaatccatctacagatggacgttgcaaagtagcctgcttgccattctgaatcaggtaagcatacaagtcgcgagccacaccatagtgtgagcaagcgtctgcacggttaggagtaatatctacttcgagtacgtagtcactcttgatattataatagtctttggcgagagtacccggaacagcttcagccggcaacacgatgattcctgcatgatcagtaccaataccgatttcgtcttctgcacaaatcatccctgtagattctacaccacggatttttgacttcttgatagtaaagcattcatcaccgtcataaagtttggtacccaaagtggcaaccactactttctgtccggcagctacattcggagcaccgcatacaatctgtacaggttcgccgtctcccagattgacggtagtgatatgcaaatggtcggaattcggatgttcttcgcaagtcagcacttcaccgattacgagtccttccaaaccacccttaatggtttgcacttcttctacaccacctgtttccaagccgattgaggtcagcgcagcagccgtttcatcgggggtcaaatcaaagttgacatactctttcagccagttataagagatattcatataattaaatttttattgtttctcaaaaagtttcgcaaagttaataagatttttcggttgacatagaacgatttgagagaaaaatgtcaagagaagctaaactaacaaggacctgactgtattattccccaataaattcatggttggtgacaaagtggcaaaaaacaaaggggtattctttgtcatttttgccacctatccctatcagaatacaacttggctatactctataaaaaataatcgaccgctcgattggagtaaatcgagcggttattttcatctgactaagcggtcattctattcaacccaaaagatgtttttttagaaaggtaacggtccttccgttgcaccgaacggattatttccctgcggaacaaagtccggttccggcggaggcggaggcatagcaccggcattcagtttagaccccagcatggcacctgcaggttcacccggcatcggtataaccatatcatcttccggattagagaatcgtgtaaactcacctttgaatcggagcaagacttcacctaccgcaccattacgatgcttggctatcacaatttccgccataccgcgcaggtcgttaccacgatcatcctgataaatcttataatattccggacggtgaataaaacacaccatatcggcatcctgctcgatggctccggattcacgaaggtcactcaactgagggcgtttaccgtcaataccttcacgactctccacaccacgattcaactgcgacaaggctataatgggaatgttcaactccttcgccaatcctttcaacgaacgggatatcgtactaacctcttcctgacggctaccgaatgccataccactcgcattcatcaattgaaggtagtcaataataataattctcaccccatgttcacgcaccagacgacgcgctttggtccggagttcaaacacagacaaagacggagtatcgtccacataaagcggagcatccagcagatctttcagtttgtagtccaactgttgccactcatagcttgccaattgtccacttttgatcttctcactcggaatctcacaaacattggtgataagacggttgaccaactggacgttactcatttcaagagagaacaacgctaccggattccgataatcaacagcaatatttttagccatagaaagtacgaaagctgtcttacccatggcaggacgggcagcgattataataaggtcggagttctgccaaccggaggtcatcttgtccagtttcgtaaatccactttcaagaccactcagaccgtccgttcgtgcagccgctttctgaatcagcttatacgcttcgtcaattaccggattaatctgcgtatagtctttcttcatattctgctgggaaatctcaaacaacttgccttccgcctcctgcatcaagtcgtccacatccagtgtctcatcaaaagccttgctttgaatattactggtaaacgttatcaattcgcgcgccaacgatttttgtgcaataatacgggcgtgatattcgatatgtgcggaagaagcaaccttactgctcaactgagtaatatagaacggtccaccgacctcttccaactcacctcttttgctcaactgctctttgaccgtcagaatgtccaccggcttctgattaacggcaagatcagtaatggcagcataaatcaactgatgacgatgctcataaaatgactccgggcgaagaatctcactcaccagcgaataagcatccttctcaatcatcaaagcacccaacaccgcctcttccagctccggtgcctgaggttggatacgaccataatcattgaccggttgtactttagttgattttgtgttacgggaatttcttctttgttcagccatctgcttatatacaattttatgatttacaatttatgatccccggcttttatacatagtaaaatccgaaagggatgacaaagatagaatataataatgaagaaaagataaggaaaaatgaagattttagtaactttgtcaccaatagcataaattcgcaacccataatttaaaattcaaaaataataattcagaacgaatatgatcactttcccaaacgcaaaaataaacctgggactctctattaccgagaagcgtccggacggatatcacaacctcgaaaccgtattctaccccgtcgctctcgaagatgcgctggaaatccggaccagccccgaagcggacaaaaagttctccctgcatcagtacggaatggagatatctggtaatccggaagacaatttagtggtgaaagcatatctgctattagataaagagtttcacctctgtcctatcgagatccatctgtacaaacacattccttccggtgccggactgggaggaggctcatcagacgcggctttcatgctgaaattactcaacgaacactttcagctgaatttatccgaagatcagctggaaatatatgccgcaactttgggagcagactgcgctttctttatcagaaacgccccgacctttgccgaaggaatcggtaacatattctcccccattccactatccttaaaaggatatcagattctgatcatcaaaccggatgtattcgtatcaacgcgggaagctttcgccaatattcaccctcatcatcccgaatactcgatcaaagaagcgatcaaacgcccggtaaatgaatggaaagagatattaatcaatgattttgaagacagcgtattcccccagcatccggtgatcggagaaattaaagccgagctatacaggcaaggggctgtttatgcctctatgagcggttccggttcttccgtatatggattgttcgagccggaagggactttacctgaaaccgattggggaactaacgtattctgttttaaaggcaggctgtaaaagagtaacaaaaaacggtaccacgactcccgtcgtagtaccgtcacaacacaaacacaaaataaaacacgacaaaactactatgcaatcatacctgtctatgccggagaggcataagtaccatttactcatattcacatactcacaaacagatcaagctgattagcatctaataaacaaatcgcatgaacgatttgtttaaacttttatgttaattaaaacaaatatctttttactgaatgcctctttcacggagtttcagctgccaattccatgcagagcgtaaagtatcttctaatgtttctaccgctttccaacccagttcctggtttgcataatcgggattagcccataccttttcaatatcacctgcgcgacggcctacaatctgataattcaatttaacgccggtagctttttcaaagccattaatcagttccaatactgaaacgccgcgtcctgtaccgatattgaatacttctactttttctttctgtttttgctccaaaatacggcggattgcaatcacgtgtgctttagccaagtcaacaacgttgataaagtcacggatacaggaaccgtcaggagtatcataatcgtcaccgaatacacttagtttttcacggatacccatcgctgtctgagtcagataaggaatcaggttttgaggaacaccgttcggaagttcacccagcaatgctgtaggatgtgcgccaatcggattgaaataacgcagcaaaatagcattgatcggggcaccggaagctactgtatcacggataatttcttcattaatctgttttgtatttccataaggagattccgctttcttgatcggagccttttccgttacaggcaactcatccggttgaccatatactgtacaggaagaagagaacactatgccttctactccatgtttaggcattaactccagaaggttgattaaagaaaccaggttgttacgataataaagcaacggcttctctaccgactctcctactgctttgcttgctgcgaaatgaataatcgctttaattcctttatatttggcaaatacggcatcaaggccagcaaaatcaagacaatccagtttctcaaaagctgggcggataccggatactttctctatattgtcaacaacgtcagcactcgaatttgataaattatcgataatgattacttcgtatccactgttttgtagttctacaacggtatgagacccaatatagcctgttcctcccgttactaaaattctttctttcatataattttaaaatatggttagtttttcggttttcagtttgtttgaggtacaaatgtatggaaataaaatggaaatgcaataaactatcgcaattttattcacaggaagatacttacgggacgatttgagggcgttttggtatgataaaaaacatattcggtatgaacagatataaagaaaaaggccggaaacaaactgcctgtatgttgccatacgacagagtttccagcctctttatctaattatcaacttagtcttttacacgacgccagagaagcccatgaatgccattgccagcaaacctgcggtaatcaaagcaatcggagtcccctgcattcctttcggaatcttcaccagggtcatctgctcacgcaatccggcaaacaataccagtgccagaccaaagccaagagcagtagagaatgcgtatacaacacctgtcagcagatcaaagtctttctggattaccaggattgccacaccgagaatacagcagttcgttgtaatcaacggcaggaacacccccagtgcctgatacaaagaaggagaaactttcttcagaataatttctaccatctgcaccagtccggcaataaccagaataaaagtgattgtctgtaagtaccccaatccgaaagcatccaacacaaacttctgaatcaggaatgtgacgatggtagcgatagtcagcacgaaagcaactgccgcactcatacccatcgctgtttccaccttcttggaaacacccaggaacggacagattcccaggaactgcgacaacacaatgttgtttacaaagattgccgagataaatatcaatatatattccatattcttttcttatttaatagagttaggctttcttcagactattaataatggcaatcagataacctaaagcgataaaggcacccggagccagaacaaagatcagcattccgtattcttccggcagaatggtcagattaaatatcttacctgttccgagaaattcacgtacggcacccaacagagtcagggcaatggtaaaaccaaatcccataccgataccatcaaacatagaagccagcggattgttcttcgctgcgaaagcttccgcacgtcccaatacgatacagtttactacgatcagcggaatgaaaagcccgagagtagcatacagatcgggcacgtatgcttgcattatcatctgcaacagtgtcacgaatgacgcgatcaccacgataaatgaagggatgcgtaccatatccggaatcagattcttgatagatgaaattaccacgttcgagcaaatcaggacgaacatagtggccagtcccatacccataccgttgattgccgatgatgtcgtacccagtgtaggacacataccgagcaggagcacaaaaataggattctctttgataatcccgttcatcattactttaaaattattcataactgtctcctcctttcttagttattagtgtcattagcagctgcttcaccttccggcgcaacagccggttcatttttctgggaagctccggaattcgtatccacctcaccgcctttatatgcctgataagcagcattcaccgcattcaggaaagcacgtgaagtgatagtagaagccgtgatagcatctacctgtccattcatgtctttggtcacagccaatggagtctctcccggattcatgcccaaaatagactttgcactttcttcgtgagataccggtttttcgttctttgcaggatcataagctccaaaccatttgtccgctttcgaacccaatcccggagtttcagcgtgcgccaataaagagtagttataaatcttgccttcagcatcaaagcccaccagcactttcagttcaccgccaaatcccattgacttggcttcaacggcagaacctacccacttttcgccattcttggccggatagataatgaaatccacgattttctttccgtctttctcgctgaaaacagtatcgctttcggctaccggattattggtatattcaggaagcacctttttcaaggcctcgttcagcgtctttgcattcgcttcggcaatagggcctttcgtcagttcgttcacataagccagcaacgctacggaaacagctgtaacgcccgtaagtaccagcaacatattctttaaagatgattgtaactttttcatttcttcttcgctacctccccaaagcgtttaggtttacaataggtgttaatcagcggagtgaacgcattcataatcaggatggcgaatgacataccttcgggatatgcaccgaacagacggataaccaccgtcagcagaccgatacaaacaccgtaaatcagcatccctttcttgctcatcggagaagtcacatagtcggttgccataaagacagctcccagcatcagacctccggagagtagttgcaatatcggagaaacatacttttcgggatccaccatgtgcataatgcctgcaaatacaaatacagtcacaatgatagaaaccggaatatgccaggtgatgatctttttccagagcatgtataccagtccgagcaacagtgccagcgcacttacttcaccgatacatccgccgttctgtccgataaacagagtcagcgcatcaggtatctggctcaaagcacttgcatcgccgtgaatagcctgtttcatcaatgccagcggagtagcaccggtggtagcgtccatataagatgtcagctgacctactaccggccatgttgtcatctgcaccgggaaagaaagcaacaagaatacacgtcccgccaatgccgggttgaatgggttgcagcccagaccaccgaaagacatcttgcctacaccgattgcgaacagtgcacccagaatgataatccagataggcagattggaaggtagattaaatgccagcaacacacctgtaatgacagcagaaccgtcacagatggttgtagcaggtttcttcattaagaatttaacgatcgcccattcgaagaataaacaggctgctaccgaagtagccgtgacaatcagagcccccaggccgaagaaataaagcgacaccagaaaagccggaatcagtgcgatcagcacaccatacatatttttctgtacgctgtctccgccatgcacgtggggtgatagtgatacgattaatttattttccatacttcgttattttttagcttgacgtgcacgaatcatagcccctactttacccttacccaagcggcagtaatcaagcagcggacggttggcaggacaagtgaactgacaggaaccgcactcgatacaatccatgattctttctttttccattgtttcaaaatctccgttttcggacaaagctccgagcaagtacggctccagtcccatcggacaagcgctcacacactttgcacaacggatacaggtttgtgcttcaccacgtttggcttccttctgattcataatcaggataccggaactgccttttgcggtaggaacttcgatattcaccagagccttacccatcatcggaccgccaccgatcacttttcccgtatcctccggcagaccgccacaagcatcaatcagctgtttcattggtgtaccgatacgagccaggaagttggaaggtttggccacagacttaccagttacggtaatcacacgctcaaacaacggtttatttttctgaacagcttcataaacagcaaatgccgtacccacattctgcacaactgccccagtagagataggcagcgcaccacttgccacctggcgtttggtaatcgcatcaatcaactgtttctcaccaccctgaggatatttcactttcaaaggaacaacttcgatgcctgcataactggaagcaactttcgtcatcagttcaatagcatccggcttgttattctcaattccgataaatgccttatttaccttcacggctttcatcagaatggagacacctaccatgacttcttccgcgtgttccagcatcagctgatggtcggcagtcagatacggttcacattccaccgcattgataatcacacattctgccttgaacgaaggaggcggacaaagtttcacctgtgtagggaaacaagcaccacccaaacctacgataccggcatcggcaatcttcttcacgatttcttcggacgaaagctcacattctttgaccagtgtcttgctacggtcaatggtttcttcccattcgtcgccttctacatcaataaagatagcaggttttgcataaccgctcgcatcgactactgtatcaatcttcgccacttttccactgacagaagagtgaattgctgccgaaacgaagccggcaggttcggcaatcttcgtgcctaccttcaccatatcaccttttgctactatcggtttggcaggtgcgccaatgtgctgccccaacagaataactgcctttgcaggaacttccgctgtgatgataggttgatgtgccgacaatttattttcgtgtggatgaactccaccaattgaaaatgtctttaacatacaattctgtattttattctgttattattctgttaccttcggagcttctgcagcaactgttttcggtgcttcttccgccttcggtttacgtggagggaagttcagctcgataatcgtgttctgcggacaaacttccacgcacttacggcatgatttacacttgttcggatcgatgtaagccaggttgttctccagcgtaatggcttcgaacggacaagtcttgacacacttaccacagccgatacagctcactgtacaagccttacgtgctacggctcccttgtctttgttcacacaagagatgtacacacggcgtgatttcttgccttgcggacgaatctcgatgatcgccttcggacaagccttcacacaagcgccacaagctgtacatttggcttcatccacttccggaagtcccgtttcaggattcatgtggatagcgtcaaactggcaggcagccacacagtcgccacatccgaggcatccgtagctacaacctgtttctccaccatacaatgaagcggcaatagcgcaactcttcgcaccgtcgtattgattaatacgcggacgattggcacagcttccgttacatcttactactgctatcatcggttcagcttcagtagctgccagtccgagaatatcagcaatttgtgccatgacaggctgaccgcctacagggcagaatttaccatccagcgaaccggctttgacgcaagcatcggcaaatccgctacaaccaggatagccacatccaccacagtttgcctggggcaacacttcccccacctgggcaatccgcgggtcttcatacacggcaaatttcttggaagctacataaagaatagcggccagcacgagcgctatagctcccaatgaaatcactgcaatcagaatcaaattcataatgttttagttatttattggttttatagtaaatgaaaaatgttgtttcattcgcgttttattgagccacaatacgaaataataaggaataagaactgccagagaaagaagagccgcatacaattcattccctatcaacgtcatccatgcgaacagggaaacaatcagaagtacaaaaggaattatgaatgcaagggttacagccatcatgcccatcgacgtttcgccgatcaccatcacccgctctcctacctgataggaagcagctgtaacatccgttatatctatgattttgtctttactatccgccgaagaacagtgtccttttgcgctacaagccgcacaagccgacgtctgaacgattctcaccgacagatgagaaccctgtatgttttccacaatacctagatgttttatagtattattcgtcattttgcaaactcaacattacaaatcgcggcaaatttaatcattatttgtgaactacgaagcattccctcatttttttctacataataaaatgttattttttgtgttttcgttatcgcacacgaaaaagtaacgccaactatttgatattttagcatacaacaaagcaggcgggaaagttcttcccgcctgcctgtcttatctaaccaattactttatttactgaatgctgcttacaatgatgcagcctgtactcccagtactccggcaatcgcaccggctacagcaatgattactttcaaaactacactccaagttttcttcatagatttttcctcctttcttttttaagcttttcagattatacagtcggatccggggcttcctcgtctcctcctccttcatttccaccaccgccattttcaccatcatccggatcattcggagtcacagaggcgttcaacttcttcagatattcatccagactgatcaaatccagtttttcatctgcacgggtagccgtcttcgtgatacgcagttccttattcgcctgaaagaaaatgcgtacgctatccacacttttagcattgacatctttcgctgcatccgctcctttcgaacaagcagtcagcataaatacccccaagccttcgatattcacagacttaccttccagaagttgctctttcattttctccacaaaattctgaatcacactcttgatatcaccgatagataaagaagaatagccctgcattttctgcgcaatatatttcagattgacagactgacctaaagtgatcagatgcggataatatttcttgggagaattgggaacacgcgggtcagatggtcgcgtaacaactttgtaaattacactcataatacgtttttttaaagattcaaattcaagttattttattcacgttttgttgatcaacaatgcaaaggtgaggcttttatttcagataacaaaaagaaaagccccttgcggggctctttttctgagaaaagttataattcatagatattcagatatttatctttttgtatcttgaccatatccatagccgtaaccataacgtttaccatagccgtagtgtttgccatacttaccgtagccgtagtaataaccgtattttcgcttcttcaggtctacgccgttgatgacggtacaaagattaggtagcttcttctcaaaagacagttcattgatcaatgtatattccgccttatgagtgtagtcagcacggcatacgtaaactgacaagtctgctacacgacctattaataaggtatctgttaccatgccgataggagcagtatcaaggatgacataatcgaagttcttcttcaaggtttctatcgctctgtccaggccgttacgggctaacagttccgttggattaggaggaacagtaccacccggaagaataaacagattcttatttacatcagaagattgaacaagctccatcaaatccgtttcaggattggaaagatactgagtaatacctctctccttattagagagctggaatactttattcaaccccggcttacgaatatcgagtccgacaatcaccactttctttcccaaaagagaaagactgatagccaggttcgacgaaacaaacgattttccttcaccactgacagtcgaggtcacaaggataaccttctgatcattatcgagcataaactggagattggttcgaatattacggaaggtttcactcatcagattattcttgttctcgaagacagcaatagaaccattcttatcattcttctcatcagtcaatggaatatcaccgacaacagggacactcgtcagtttctctacatcagcacgaccttcgatcttgaatttcgtcagatcaatcaaatagatgataccgacaggaattccaatacccaacaccaatgcaatcagataaatcattttgcctttaggagataccggaatatcgtcagctattgcttcatcaataatttttgcattattggcagtagcagcaagtgcaatcgcattctcttcacgtttctgtaataacatcaaatacaatcccgccttgatctcctgctgacgggcgatgcttacataagcacgttcctgtcccggagcgttactgatacgacgagaataacggctcgcttcacggtcaagactttctttagtaatcatcagtccttgcaaagttccttcaagagtagcctgtacattggctttcatagcacggatactcgtatccaagttcacaatagtagggttattctctgttgatgtgcgcaacaggcgtttacgctcaataagcatctcgttataacgttcaatcgctccgatcaaggcggcatcctgtaaacctacattactcggcaatacttcgtattcattacctcgcaaatatttacgcaagtcattcaccaggctaatttgagtacggttctctacactcttcttttcatactcagcattaccagccaaggctatctgagcttcactcgtcaaatccgtgatacccgcatcacgcttgaaggactccagattagcttccgtactacctaattcttttgagataatgccaatacgttcatcgataaattcggccgtcttctgagcgatttcgtttttatcattgttcgtattgcgattatacatttcaagcaactggttgataaaatcctgtccacgctgcagactggagttcttcaatgaaatcacagcaacagaagtcgttttagaagtaggagcaatagataaactgttacaatagtctcttgccactctcatcggtttatttattgtcgcagttatatgacgtacgttcttctctatccgaggaaccttcgttccatcctgtaaagttaccgaatcaactccctgaaagaaagccaatgtaccttcatcagttggaaaaatggcaggtaacttttcaaaatgcttctgatagcccttttcacctacagtcacattcacatccatactaccttcaggttgtaaggtcatctcgactaccatcgaagttttcagtttttcagcctcttgaggtgtcaaactcacttgtactggagatgtcttatataaacctttaacaggaaactcatcctcatctttataggttatatacagtcccaactgattaaccacctcttttaccaaggttttcgaacgtagaacttccaactcgttatcaatgtttttagaagatgtcatcagaccgcttaaacccatatcctccaattccgaagaaagtcctgcacctccacccttcttctcgtcttttatcagaactgtagcggaaatattatagatgggtgtagcccagtgcaaataaaaccatgcaccaacaaaacatagcaacacagcacctacaaaccagggccagtgaatgatgtatttaaaaagcagtgcccggaaatcaatttgctcctcagtcatttcaggtcctttcccgttttgatttgcttctttcatgcctcttttttttatttcaagatgttaaacaataaactggcaatagaaacaaggatcgaagtagcagagaaccacaaacttgtactagttccgatatccgaatttcgggcttttgccttattcggagttacgtaaataatatcattctgttgcaaataataataaggagaaagaatagtctctgccttattcagatccaaaggaataatttcctgcttaccattggcgttctcccgtatcagcttaacatcatcacgcagaccatacacagtcatatcacctgccatagccagag

SEQ ID NO: 4569 - DNA, 74270 bp, Unknown
  gut microbiota DNA sequence
ttatacgggtactttatcgggggattacattttagtgcacttcatagtcaatatattagttatttaatactacaaagtctctaaaaaacaggattttatacaaaccttcaaattagttatatggatatgataacaaaaataatttcggagaagaaacttttttggataagtttcgccatagttgggtatttttgtttattatatttaaatgcttacttcgcaaaatccgacttagttttcatagggtgggttcaagaactactaacgataccatttatactttttcagtttatacttttaatcattgcgattttgtactgcattaaagatacatttcgagtaaatagatattcgttttggagtttttctattttattgataaataatctatttgttatctgtagtttaatcttcagataaatatagttcaaaagcgaagtgtttcttgaaaaccacagcccctttcaccgcttatcgtgaaatctatatccaatccccagcattagattgttagggtctttaaacttactcaactgataccccacgtgcaaaaacaaatggcgggtaacataagttttgagagccaaaatttgatagaaaccttccgtatcatcgccactatatatcatatttcgtccgataccggcattgatggagaaaataggcatcaccagttctgcccgaagagacaaccccaccgcaaattgttcgcggaatggaggacgatgaaactttatatcgtccccataagttcctactagcttatagtccttaatattagcactctcgtcaaattgcgcatccacagaaagtcctgcccggaaatagttattgaaattatacatcggggcaaaattgagacctacaataccgaacgaaccaggaaccaaagtgggtataccttctttaacgaatcctcttttgcgagtggcaccgtataccaacaagtcatagctgacgtgtggctttatgtaaagacgtttgggagcaattgctccggacgccttatcttcggcattaaaggtacgtacaatgccgactctccctccgatagtattgagacctccattgggataacgcgtatttccattggagaaatgagtgaagtccacccctgctgctagtttccactgtggataaaactgccagttcaagacaaagcccaaattgatatacgcattgattttagaaccaatagcgtcattgtaccaattgctgtgttcatcatattgtttccaaccgaaagaagcaccaaaattccactcataatccaacgacaaacgggatgaaagccgtacaataggcgccccttgaaaagcatataccgccaccggatttcccagttcagcggaattataaaatgtattatgcgaaacaccgatgccctgataagcatgaggatacagcctccccaaataggaatctttgctgaactggaaagcatacttcaagtgcagggaaagtgaccgatcaattttctgccgttgtgcattatcgccttcaaggaaactgtttgtcggagctacatagcccggacgaacgtcaaaacctatctgatggatgagggcatggttggtgctgtcattctgttgcctgacaggtttcactactgtctgagcgtccaatttgttgccgactgctgaaagcagcagcaagcagattatatacagagaccgtctggtattcatatttctactcatttgatattctcttgttttacgtagttatccgtaggtatggtgctttgaaacataccagttatgactcgttgcttcttggtcttaggatgaatggcataaagggtatattccgtttcaaaccattcatactcttgcattaaggtgatgtgctgcgtggtattagccgggataaaaatatctctatatatatcgggaaaaggaaattcttgctccatagaagtatattgcgcctgtaccccgttcatcaccaaagacccattctctatgcttggtatctctactgtcagattaccatctcccagtagttggaaagcctcggacgtatcgcttctgaacgttactttatggcgaatcccttgtactatcaagtgcaatggagagggagtattctcaaaattagatcgtacaatattcacttcttcctctatttttctttcactataatatgcatttaaagaataagtgatatgagcgaacacatatctgtccgacggggtaatttgaacatatatttcttgtgattcatactcattgctcactacaagcatgaatctaaagtagtcgttacggacgttttcgcccaccgttatctttagctctttggggttactgcgttgaatgatgaaatcggtcagcttttcattgcacacaatcttacctaatcctttcaggtagacatcctggtttctcattatcagattgtcgtcggcatcataaacttcatattgatgggtaaagtcactatcgtaagtatacatccaaaccaaatcccaattggaggatgcaaaacgaatagttacctcatcaccattcccgtccaaagtaaattcggtatcggaagtccggaagtcgtcgacgaatacatcatcgttacaactataaaatcctaatagaataagaatatatgctgttaagtttacgattgttttcatgtcggtcgttatctagttattttgttgacgacaaaagtaatacatatttttagaagagtgttattatcacccctgtttagttgccacataaaggaaaataaactatttttgctctcaacattaaagaaggagcaattatggatgcagtaataaagaaaataccttatgggatgacggacttcgagagaataattcttgaaaactattactatgtagacaaaacacaatatatcgccaaagtagaaaaagtgacctccttctttttctttgttcgccctcgccgtttcggaaaaagtcttttcctaaacatgctcggtttatattacgacatcaaccaaaaagataaattcgaaaaaatctttggtaatctttatataggcaagcatcctacgcctgatcgcaacaaatatctggtgcttacactcaatttcagtagtgtagccgccaatatggatcgtttggaagaaacattcaacacctattgcaaaatcgtaatggatggatttgcagaacgaaacgctcatctgttagggaaagaagccgctgaaaagctacatgaattaaaaacaggagatgccttattgggatcactgtgccaaagcgcccaaaacaagggactaaagatatatcttatccttgatgagtacgataactttgccaacaatattctggtagattatggcaatgaacgttatcgcagcatcactcatggctgcggattcttccgtagtttccttaaagtggtaaaagactattcaagttcagtgatcgagcgcatcttccttacaggcgtaagcccagtaacaatggatgatctcactagcggattcaacattgcggataattatagcagttcacctatctttaataatatgatgggatttaatgaacaagaagtacgcactctgatcgattattacaaaagttaccgggaactaccgcacactacagatgaattaataaccatcatgaaaccatggtacgacaattactgtttcgccatgaaagcgctaaaggaaccgtctatgtacaattcagatatggtgctctatttcatgaatcattatatgctgaatgaggacatccctgacaatatgctcgatgctaatattcgcaccgactacaacaagctgcgccacctcatccacgtagacaaaactttcggtgaaaatgcaagcgttgtacaagagattgttgaaaaaggttctactaccggaatcattgcaaacagtttcccagccgaagacattatcaaaccggaaaactttaaaagcctactctactattacggcatgctaaccatcagcggaatggaaatgggtgagcccatactgagcgtccccaactgggcagtgcgcgaacaactttacggttacatggcagacatctacaaagattccgccgacctatatctggagacagataagctggtggaccgaatgaaacgaatggcatacaaaggagaatgggaaaattgcttcacatacattgccgaccgcttgaatgcccaaagcagtgttcgcgacttcatagaaggtgaagcttatgtaaaaacctttattttggcttacctcggattgacacattattatattgcccgccccgaatatgaaagcaacaaaggatatgcagatatctttctgcaacctcgtctactgcaacttcccgacatggtatacagctactgtatcgaagtgaaatatgcaaaacgggatgcttctgacaccgagatagaaaaattgctgtccaatgccaaaatacaactgaaacagtatgcagcaagcgaatggattcatcaagacaaagggactacagaattaaagagtatcgcattagtgttccaaggctggaaactggtgagagtggaagaagtataaacagctaatcaaacaattctttcagtacatccagcgactttaatgcaggaaaatccggcagatgcaaacgataataatcattcataatcgtcaggcagcgagtgcgttccgcacggctcatgccaaataagtgcatcgtctcatagttcatgcgcatcagctggcgaagacgtccagcctcttcgggattaatataagaagaatgcaactgcggacgagtggaagtgaaacaagcattcagcaagtcaaagtaatcaccggtgtgataatcttccagattcggatacaaccccaaaaaacgggaaagacgcatcagaaaaaccagatggaaattggcaaacccttcgcgacattcgtccagccaaatgacagaatgctgcaaataagcgaacaacggacgattctcagcctcttcacggatagcacgatacagaaactctgccagaaaaagtgccattgaagacttgtacgggtcataaggaatggaggtaaaaggataaaaagacttcgcctcttttacccgatagagagtggcattcggacgataatccgcctcaaactcaatgaaagacaaaggctggaagagtactgacttgactgccgccttccgcgaacggggtacgggaacgagaaaagaagtccgcccggctaactccgtgtacatatctacaatgatagaagtatcattatatttaagcgtatgtagaactattcctttcgtcttttgcagcataatgcactcctctttttatcattccggaacaaaactacaaaaaaatgtctggcaatcgggagctttttagaggcgttaacaacaaaaaagattgctatttttgttatactccctgaagaacaagtaaatatagacaagagtatgaaaagaaaaagtaataaaaacagctttaccggatgcgcaaaagcatacatccggaatctacaagaagagggtcgttactcgacggcacatgtatacaaaaatgcaattctgtcatttgccaagttttgtgatactcccgaagtcgcattcggacaagtcaaccgcgatagtctgcgacggtacgggcaatatctttatgactgcggattgaaaccgaacaccgtatcgacttatatgcgtatgctgcgcagtatctacaaccgcggtgtcgaagcgggtacggcccgtttcatcccccgattgtttcgtgacgtattcaccggagtagatgtccggcagaagaaggcactgcccatcaacgaactgcacatgttgctctacaaagtccccaagtccagccacctgcgtcgcacacaagcgatagcacgactgatgtttcagctctgcggcatgccgtttgccgacttcgcacatctggagaaatcggcactggtacatggagtactgagatataaccgtataaagaccggtactcccatgagcgtcgaaatactggaggctgccaagaaggcaatcaacggattgcgcaataatgaatcttccggagaggattgtccggactacctgttcgacatcatgaaaggagataaaaaacggaaagaagaggcaggatataaagaatatcaatcggctctcagacgattcaacaatcaattgaagagtctttccagagagttacacatcaaatcgcctgtcacctcatacaccatccggcattcctgggcaacgagcgccaaatatcagggaatccccatcgaaatgatcagcgaatcattgggacataaatcaataaagaccacgcaaacttacctgaaaggctttggactggaaaaacggacagaagcgaataaattgaattgtttttacgtagagaactacgttgcgagcaaacaccgagagacaatatattgaatataaacaaattaccttatctattacttcttaggtaacggaaataaatacagcgcaaagatatagaaaaagaacatcacattccaaattaattatacattatttcacttcctttctttcaaaaaaaataaaaaagaatacaggagcatgaattatatctgtttcatgttccagaccgctattgtgtctgccggactatttttcagccggaaacctataaatacgctttagcactcaaagaccgctgccttttttacttctttcccctccacataccggtcataagaccggatttccgttacctaagaagtaacagaaacacataaacaaaagattatgacacacaaacccgataggaatagaaaaaggatatctacagccgccagcataaagggactcacggcagtcttgaaatgtatgttggcaagtatcttccttacctgtcttttgcccgcctccagtctatacgggcagaagatagccgtcaagagtaatctgctctatgccctcacaaccactttcaatatagggggagagataaggtgcgatgatacgcacacgcttaatctctctgtcaactacaatccctggaacttcgggggaaacaaaaagatgaagcatttcatgctccaaccggagtaccgaaaatggtttgacagagtgttcatgggaagctacatcggctttcaacttcactatgctctattcaactttggcggaatgctcccttggggattcggaaatggtaaaatgctgggtatcgaaaacaggcagattgccaacaaccggtatcaaggcaatctggcgggcttcggcatctcctatggttatcaatggatgatcagtccgcaatggaatctggaagcgggactttcactgggatatgcccacctcaactacaaacgctatggacagcccgaaggcgctgcctttatcgaaaaatcccactgcaactactggggccccacgcagatagggatatcactcgtgtatttcattcagtaaatcaattaaatcacaacataacatgaaaacgaaagcattcatctttttcagtttattgatatgcaacttgctaccggcacagaacgttaagctggatatcgtaccccacttcttcggcgtccgtgcagattcactgtttctgtccatggatatttcagtccatatagaagacatggattccaagagtgcctttatactgacacccgtgctgaccagccaggagaaaagagtatcactgccgcacatacaactgaatggtaagcagaaacagaaactatatctacgcaatcagattttacgcaagaagaatgaccggaaagaagaggatgcgaaagcttatctgattgcccgcattgacgaggaccactcccgtaccatttcctaccggacttcattgccgacagaggattggatgaataatgcaacactgatacttaaaagaactattgtccgtccggaaggtgaacaatctctgaaagatacaatcgtcataactcctcaaaacatagcagcatcttccggcgcaatagttccttccggtacagctacacaagaggtcgttcctctttctgttgtcaatgaacgccctacgagcccggtagtcggcagcaaaatgaaatacaagggtacttacgtttcgcccgaaacggatgatgtggacgcacgaaatcagaaggaattgaatttcagccttgaagaggcgaaaatgatagcggagatcaacccgcagatgctatctctccgcgaactctacacagtcgccctgtcttatacggaagacaaagcccggttttacaagattatcaatattagcgtcaagctatatcccgtacatccggttgccaacctgaatgcagcagctgccgccatagaacagggggacgtcaaatcggcaggtaaattcctttcaatggctcttcacgacagtctggcttataaaaactgccgcggagtatacgaactaatgtccggaaacacctacgaaggcatccgaatgctgaaagccgccaaagccgaaggctccgaagaagcggcatataatctaaatgcattttttgaaaacaataaacgcccttaatcaacggatataatgaaacatttcatattcctgctcttattacttggatgcctggacgcttactcacagaaagcagctatcagggtgaatgcgctttctgccatagacggagctttcggagggggaatttcgtatgccataggaaaaaggagtacagtcgagcttgccggaagcctgcgaccgtggaaacggagcgaagaatatgtcaaccgttactggctcctgcagcccgaatataaatactggacttgccagaagtataacggctttttctggggagggtatctgaacggtgcccagttcaacattggaggcaagaaactgcctttcggcatattctcccaactgaaacgccaccggtacgaaggctggctggcaggcggaggtatcagctgcggatatcactggatgctgaatgaccactggaacatagaaacaagtgtaggagtaggatatgaatttatccattacaggcaatacaactgcgtagacaaatgcgcaaagctaagagaagaaggaaaatatcattacgtaggacctagcaaggcctctataagtttaatctacctattttaaagaagaaagaaagatgaaaaaattatggaaagtctggttctccaaacgaagacatctctacatagagatagcacgcaaacaccggtccacaccgtggagggtgtaccatctgggacatggtggcagaggaaagacattgaaagatatgaggatattggaagaacttcagcaatacggaattatatctcacatctatccttggtgaacaggctatttttaaatatagatccattattagtacgactatgaaactgggaggagtttttatcattgcggtcatagcatctctatcgctacaggcgcaaacgaccgtagaagaagctaacggaacgatccgagctaccgcttccagccttcacaaggcaggggaagaactggtggtttctatttcggtagaaatcacccgcgacctttcgtccaacgaatcgctggttctcgtacccgttgtcaccgacagtctggagaatcggttggaactgccttccatctacatcaatagccggaaacagcaaatcatattcatgcgcgaaacgggcaaaaaggagaaagatgcccgttcactacaacgaaaaaacggaagcaggcaaagcatacattatctgcaatccgttcctttcgagaagtggatgaatcatgctacactctccctgatagagaaaagttgcggttgtggcatcgccggagaagaagccttcacttgtatcgcccgcctgcatccgcaaccgatacctgtcccacaactcgtatttctcaccccacaagtggaggggctgaaaaccagaactgagaaaggatgcgcattcatcgactttcccctaaacgacgccatcatacatgaaacatacagcaacaatgcgacggaactgaataagatcactcaaaccatagacgccatcagaaatgattcgaatgtaaccatcacacatatcagcatacacggctatgcatcgcccgacggaccttaccaactcaacgaaaggttatcctgcgaacgcacacaggcattgaaggaatatgtgtgccggttatacacgtttaatccaacggatattcatacttctcatactcccgaagactgggaagggttcgaagcccttctcactgatacaacctttcagcggaaggaggcagtcatgaaaatcgtgacaggcaacctgcaccccgaccgcaaggaagagaagttgaaaaaacaatttccggcattctatcgctttgtgctggaacactggttcacgctgctcagacattccgattataccatcgaatatcatgtacgtcctttcagcgtagaagaatcacgaaatgttttcgccactaatcccaagaacctaagtcttgaagagatgttccgcctcgcactcacctgtacgccgggaagcgaagcatacaacaaaatcttcatgactgccgtacaattattcccagataatcctgtcgccaacctgaacgcagcttgcatcgctctgatgcaaagagacgtgcagtccgccacacattatttggagaaagcaccggaagtaccggaaacagcattggcaaaaggtgtcctgcaccttcttcaagagaattatgaagaagcggaaacactcttcaaacaggccaaagctgccggactgtcacaagctgacaacaatctgaaacaaatattagagcttaaataaatgtttaattaaaatcaatggtaagatgaaacaatttacaaaactaatggcaatgcttctgtttacagcagccacacagtacagttgcatcaatgatgcagatgtagcaatccccgacaaaacgcagtcggactcgaacggcaacgtagccctgttccttgaaatcccgaatgttcccgccagccggagtgccgaatcatcgggtgtaaccgaagaaggctcgaaagaagaatatgcggtaaaaacccttacggtctacttctttgactcagccactaaaactttcgttgagtcccagcctcttgaaaacatcacactggcagggacaagcggacaaaaaatacactacaccgccaacaaaatcacaatgaaaccgggaacttacaacgtattcgccatcgccaatggtgaagcaatcacagcggacattgcaacacaggacaaattcctcggagctatcgacaaagtgacatacagcgcaggaaagattccaagtgtacccgagagaggattcgtaatgaccaaccgtggtgccgcaaatctgaatgtcgaagtaagcaaacccacagattccgacaaagtaaccgacatttccattagcctggaacgtgtcgttgccaaaattgaagtgacacagacacaggagactttccccctgaaagacccggccggaaaaacttactgtacggtcaaactcaataacttcagaatgttgaacctggcaaccgaattctacactttccgccatacagccgtgctgaccagccttcaggaaccggactcatacactgatgagaacttcggcaacatcaacgataacgacggttatgtaatagacccttacttcttcaagaaaaccgtagaaggtgccaaagacttcaagaatgaggacggtttctttgcacaggcattggtacagcttaacattgacgacagcaattgggcaggcatggctccggcaaatagctggtcacgcatctactgtctggagaactgtatgttccgtcccgcccagctaaatgcctataccacaggagtgatgttcaaagcaagtctcgacattgccaccgaccgcgtattcaacgaaagcggagaaacagtaagcaacccgtccaactggccgaccaacctgttctacttcaactacaacttctacaccagcgtaaatgcaatcagaaaactggcactcaacaacctgcccggagacattaccgacaactcgacaacagaagagcttgccaaatacagcatcaagcgtttcaagaaaaccgaaaactacgcatgctactacaactactggatcaagcatgaagacaacaacaacgacaccgaaatgggagtcatggaatttggtatcgtacgcaacaatatatacagactgtcagtcaataaagtagcaggcctgggcagcggcgaaccatttatcgaaccggaacaaccggatgaatacaaagcagaactgaacatcaacatcgatgtttttccgtgggccgtacgtaaccaagatgtagaacttgaataagtatcggccactttgaactaaatttattaccaatgcgtccatttttactacatattatctgcatcgtcatgctgttctcatcctgcaactgggtgaacgacgatctgtcagactgccctaccgggacctggttgaaaatctcgtatacctataatatactagatgtggatgccgcttcctcacaagtaggcgacatcaccatttttgctttcgacaagaacaacaagtatgtggacagactggacgtagacagtatcgcattacatcaaggctactgtatggtaagagtgccgtttcccgaagggagctatcatctgctcttgtggggaggagcctccgaccgtcaataccggttcccttatctcaaaaccggtcagacggaacggaaatcattgctcctttcattgatatgcaacagtgaaaaacagatgaacgggaaattgaacggcctcttctacggtagccttgaaaatataactatcagtaatgactatcaggtattggatgctcccttagtcaaaaacaccaattatttctcatgcatccttcaggacgacaacaacctgctgaatcaggaagatttcactttcacattggaggctgccaatggtgtgatggatcataccaacactccgttggggacggagccggtttactatcgtccataccggcaggaagtcagtatactcgatgaagaagaaacccctgtcatccatgcccggttgaacacattgcgcatcatgaaaggagatcagaccacattgaccataaagcatgtacccagcggacaggaaattctgcgtcttccgctcacccagtatctactgttatccaaaatccacagtcataccggcgatgagatgggcgatcaggaatatcttgacaggcaggattcatacacccttttattcttcatacagtcatcggatatggggattccgaagatatgcccgagaataatggtaaacggatggaccgtaaggctgaatgactcagaactggagttttaggaacacatgactgattgtatgcgtacggaatttaggtgagatgttctacagaaaaggctactgtgaagtatccgagtggtattttataccctttattcgcatgtttagtttcccacaacatgctaaatttccttataaaacggcacttcattgaaggactgttttattaattgtttgttttgtttgtgttggtgcacccgttcaagcgaggatgggtgcgcttttactcgttcaataaaagactatcactgtcatttgcatacatgacaaatgatacgtttgtttatatccgtatatctataaacgctctactgtttctgatagttcacaagcatactcctttagtcgttaaaacaatcatccgattacaagaaaagtcgcaaatacatcgttttttcaaaatcaatgtaacaataagaatggaagtccataaatccttatatataataaggtataaatatagcacattattcatagtcttatagacggagatatttttttcgaaaaatcgtaatctcatattttactgaaaatcaagcactatcaccccaccccacagaaaaaaagagaaaaaactacatatttttttcatgaattgtttgtcagtttcaaaaaagttcctacctttgcatccgcaatcgagaaacaaacactgattcgagagagcaaaaagcagaaatgcaacaacaggatggcccgttcgtctatcggttaggacgcaagattttcattcttgaaaggggggttcgattcccccacgggctacaagtaaaaagaataaagaactaaaaaaatagattagtcgaaatggcaaatcacaaatcatcactgaagagaatcagacaagaagagacaagaagacttcataacagatattatggtaagaccatgagaaatgctgttagaaaacttcgtgcaactactgacaaaacagaagctgttgcaatgtatcctggcatcactaagatgttggacaagttagctaaaacaaatgttatccacaaaaacaaagctaacaatctgaaatctaagctggctctttacatcaacaagctcgcttaataatagaaaaacaacaattctatatagcattcaggctgaacttttaagttcggccttttgtgtttataaaccactgaatatcagattactttcccattcactaattccgcttttattctacatttttcacctccgaaacttcgccaactcgacaattttcactatatttgctctgttattataacttagaaaggcaattatgagcgaagaacaaatcactcccaataacgggtcttattctgcggatagcatccaggtattggaaggtcttgaagcagtgagaaaacgccctgcgatgtacatcggtgacatcagtataaagggacttcaccacttggtatacgaaatcgttgataactccattgacgaggcactggccgggtattgcgaccacatcgaagtgacaatcaacgaagataattcaatcaccgtacaggacaacggacgtggtattccggtcgactatcatgaaaaagaaaagaagtcggcactggaagtagcgatgaccgttctgcacgccggaggtaagttcgacaaagggtcgtataaagtttccggaggtttgcacggtgtaggtatgtcttgcgtaaatgcactgtcaacacacatgactacacaggtattccgcaatggtaaaatctatcagcaggaatatgaaatcggtaagccgctttattctgtgaaagaagtgggggtatcggatattacaggaacccgccaacaattttggccggatgatacaatctttaccgaaacggtgtatgattataaaatactggcttcacgtctgcgtgagttggcatacctgaatgcaggtctccgcatttcactgaccgaccgtcgggtagtgaatgaagaagacggcagcttcaagagtgaagtattctattccgaagaagggctgagagagtttgtacgcttcatcgagtcttcacgtgaacacttgatcaacgacgttatctatctgaactctgagaagcagggaatacctattgaaatagccatcatgtacaatacaggattctccgaaaatgtacattcctatgtcaataatatcaatacaatcgaaggaggtacgcatcttgccggtttccgccgtgcactgacccgtacgctgaagaagtacgccgaagacagcaagatgctggaaaaggtgaaagttgaaatctcgggagacgacttccgcgaaggtctgactgccgttatttccgttaaagtagccgaaccacagttcgaaggacagaccaaaacgaagttgggtaacaacgaagtaatgggtgccgtagaccaggctgtcggtgaagtactggcctactatctggaagaacatccaaaggaggcaaaaacaattgtagacaaggtgattctggctgccacagcacgccacgcagcaagaaaagcccgtgaaatggtacaacgcaaatctccgatgtccggaggcggtctgccgggtaaactggccgactgttcggataaagacccctcaaaatgcgaattgttcctcgtcgagggagactcggcaggtggtactgccaagcaaggacgtaaccgtatgttccaggccatccttccgctacgcggtaagattctgaacgtcgaaaaagcgatgtatcacaaagcactggaaagcgatgaaatccgcaatatatatacggcactgggtgtcactatcggaacagaagacgacagcaaagaggctaacatcgaaaagctgcgctatcacaagattatcatcatgaccgatgccgacgtcgatggttctcacatcgacacactgatcatgacattcttcttccgttatatgccgcagattattcagaacggttatctgtacatcgctactcccccgctctacctctgcaaaaagggtaaagtagaagagtattgctggacagacgcgcaacgccagaagtttatcgatacctatggcggtggtctggaaaatgcggttcatacacagcgttacaaaggtttgggtgaaatgaacgcccagcagttgtgggaaacaactatggatcccgacaaccgtatgctgaagcaagtaaacatcgataatgccgctgaagccgattacatcttctccatgctaatgggtgaagacgtaggtccgcgccgcgagtttatcgaagagaatgcaacatatgcgaatatcgatacataattttaatattacgtttttataaaccaacctcacatcttacaacgaagaagcgtcggcaagcgaaggaaaatcctccgtgccggcgcttttctatgtcttaataaaacctaacagttaaatctttttccggtcaaaatcactatcttgccgaaaatgaaggaggacacttatgaaaacgactaccccaaatcctgtatttgccaagatcagactctatctcagaatcctggcatcctgtgtgattgtcacttgcctgttcctaattattatccatccggaggcatggattactccggcttgcattatcgtagctatgatctgcctgttatttcttctgatacgatccaaacgcaaagagtcgaggaaatgaaagaaatatcagatcatatcatgcgcctttaattccttcactgcgacttccagttcctggtaccacttctcgccgaatttacggatcagaggttctttcaagaattggtagacagctacgttttcttttttccccagcaacacagccgccttacacacatcccaacgatgatagttcaccgccttataaggtccgtaatctccaatccgaatgggatagagatggcatgatactggtttgtaaaagtctgtcttgccatcccgataagccttttcgatggcacagtaacaacatcctttctcgtcatagcaagtaaagacgcaatccttattattaacaatagaagtcaccagatcaccttcctgatccgtgtatacgactccttgcttctcaatgacagcacgcgcttccggcgacagttcctcccatattatcggcagaacctcttccagcttttccacttcatccaattccacaggtgcccctgcatccccttcaatgcaacattcgcccttgcaggcgtccagattacaaaggaacttttcccgaaggacatcgaagctcactactacatcttctatctgaatcataaaacttatgtgagacaaaaagggcggagtatacccccgcccctttggttatagcattctaaattacttaatcaaaatctgaccgttcatatcagccggagcttccagacccatgattttcaggatagtcggagccacatcagccaggcgaccgtcttctactttcgcagctttgttttctgttacgtacacacaaggaaccgggttcagagagtgagccgtattcggagtgccgtcttcgttcaaggcatgatcagcgttaccgtggtcggcgatgatgatagcttcgtaaccttgtgctttagcagcttcgattacgtctttcacgcaagcgtctacagccacaacagccttctcgattgcttcgtagataccggtatgaccaaccatgtcaccgttagcgaagtttaccacgatgaaatcatatttgttttcgttgatagcgtctaccagtttatccttcacttcgtaagcgctcatttccggtttcaggtcgtaagtggctactttcggagatggaacaaggatacggtcttcgttgtcgaacggagtttcacgaccgccgttgaagaagaaagtaacgtgagcatatttctctgtttcagcgatatggagctggctcagtcctttggaagcgatgtattcgcccagtgtgttggcaacgttttccttgtcgaacaggatgtgaacacctttgaaggatgcatcatacggagtcatgcagtaatattgcagtcccggaatcgtatgcatacccgcttccggcatatcttgctgagtcagtacgacagtcagttctttagcacggtcgttacggtagttgaagaagataacgacatcaccttctttgatggttccgtcgcagttggcgtttacaatcggcttgatgaattcgtccgttacaccttcatcgtaagattcctgcatagcctgaaccatatcggtagctttcttaccctggccgtttaccagcaggtcataggcttccttcacacgttcccaacgtttgtcacggtccatagcataataacgaccgatgatagaagcgatcttgcctgccgatttctcgcagtgtgcagaaagttcttcgataaatcccttgccactcttcgggtcagtgtcacgaccgtccatgaagcagtggatgaatgtattgtcgatgccgtattctttggagatgtcgcaaagtttgaaaagatgaaccattgagctgtgtacgccaccgttggaagtcagtcccatgaaatgaacgctctttccgttttctttcgcgtaagagaaagcagaaacgatttcggggttctgcaggatgctgttgtcagcacatgcgcggttgattttcaccaaatcctgataaaccacacgtccggcaccaatgttgaggtgacctacttccgagttacccatctgtccgtcgggcaaacctacgttctcaccacttgcctgaagttgggaatgaggataattgttcatcagataatcccagtaaggagtgggagtgttgaagattacgtcgtctttcttttggtcgcctagtccccaaccatcgaggatcattaaaagggctttcttactcataatatttcaatatttaaattatcactctgattttcgggtgcaaaggtacaaaaaagatgattacgtaaacgtttaatctatgttaagttaaaggggaaaaagagagggagcgatggatatttttctttctttgtatagggaactactaaacgcatttattcaaaatttaatattatgaaaacgattctactctgcatgatgctcatgctgtcgggtatgctcacagcacaaaccgtcgacaatccgccattcaaagcccgttcgggaagtattggtaacatcacccgtatagaacgcacgcccgatggcacgcgtgtttatattcacgccatcttccgtccgcactggtggataaaggaagaaggagacagttatctggaagatgcagccaccggcaagaaatatcagttcaagagtgcggaaggcattgagctcaataaagaagtgtatatgcccgattcgggcgagatggactatgtgctcgttttcgaagccctgccggaagagacgcaggtcatccatctcctcagtcccagcgatacggaaggaaatacgtatgacatatccttagtaccgtcctccgacaaaaacgtttcgccgttgacggcaatcaagggaaactggttcaaggcagacgacttgaacgcctgggaatacggcatctacgattctgtcacgattatggacaaccggatatttaccaacgaaaacatccgcaagaaagggaagcgggtggaaatcaccgtcaaggacaagcagaatggaaacatacgtaccctgctggtgactccgcagaaagacggaagctgccagatacaagtgaatggagaaaagaatcagctgtatacccggcaaaggggagctaccaagacaatcgctgccgacacaggctttcagcagttcttccacacagataccacctgtctgcaagggtacatcgacggctacgaccgccggctgggattcgacaccggactcatctatctatccaaccatatcacccgccaggactatccgactgtgattcagatagacgaagacggcagtttcctgtgcaagtttgtcatcaagcatcctgtggaacagtccgtcacgcttgacaataactggattccattctatatcgaacccggacagacacttaccatgtatatcgactgggaagcattgctggcacgcagtcgtgcacgcgactattatttcccgatcaagaatacagcctacatgggtccgtcggctcccctctcctatctgctgaaggaattcaagtcgctgatcccctaccgttacgatgatttatccaacgcgcgcaacaaactgactcccagccaatatcaggagcacatgaagccgattgtcgcccgatgggagcatacagccgattcacttattcagatttgccgcccatcggcaaaggctgcccgtctgatcaagaataaggcagacctgcaggcaggaggcttattcttcgactttctgatgagcagagattattatgcgaagcaggatacagccaaccaagccttgaaagtgaaagaagaagattcttattacgacttcttgaagaagatgccgctgaatgatgaaacagtgctcgccgatgccaatgccagctcttttatcaaccggtttgaatatatggacgccttcagaacagcctataattatcatgcaccgaaagcaaaggataccatctcttacacgtatccggaagaatcgcttctcgctttccttaaagagaaaggagtaaaactgaatgcagaacaggaggcaatcagactgaaacaggagaaactggcaggaacaaccgtcagaatccccttaaaagaacttcaagaagagaatgacaaggtgaaaggcttatacgaaaaagaagaaaaactggtcctggagtacatcgacaagcagtataaaaacaagcagtcagagcaagacatggacagaaactttatctcgatggaacaaaaaaccggtcataagaaagacagcattcttgcccggctatatgatgtgcccgatcctttgctttggcaaatagccaaagtccgcaacctgggtttcagcctgcagaatatcaagacacgttccattgcccgtgagtatgtggacagtatcaagcaaaagctcactcacccacaattggcagaagaggccgaatatctgttcgccaaaacgcatccgaaggaaaaagtcaattcctatcaacttccggaaggcaaagccaccaacgttttccgcaacattattaagaatcatccgggcaaagtcttgttcgtagacttctgggcaacgacctgcggaccttgtcgcgcaggaatagaagcgacggcagacctgcgcaaaaaatacaaagatcatccggagttcgagttcatctatatcaccggacagaaagactcaccagccggtgcatataagcaatacgtggaaaagaatctgaaaggagaagccagctattatgtcaccgactcagagttcaattatctgcgccaacttttccgcttcaacggcattccgcactatgaacttgtgctaaaagacggcagtatctccaaggaagaactggggacgcatagaatcagaaagtatttggaggagcacttccccgtttccgaatctgccggacagggagaaaatgctcagtaatcccggctgaacctaagtggaacacattgatagcgaagcatctcttcttcagtttatactaagaggagatgcttcgacaagttcagcatgacaaatactctctagaaataaatgcttttctattgtcacttatcacctttcgaagataacaaactgataataaacacacttcgggtgataatagctggtgacaatagggtgataataaggtgataatagccgtaaatcatgctttttattgtcactttacccctatttcacgacttattacctgtcacttcctccccatcttattacctattacttattacctgttacttattacctatcacgcctcatccgagccttgtccttatacaacaaataccataagctaccaatgcttttagctcatcatgcctttatacttccattaagctaccgcagggaaaacgcattataaatcatgtaaaataagttcccataagaattcattatcccaccctgctattaatctttttctattgattggtatctctcttttgttgtttctcaatgtggccaatgcaattttcgccagtacggagaagtttaatgctgatatatttcttcttctggtattgtcttcatggaaattgacatccaactgccaatgtagattattctcaatttcccagtgttctctactatttttaagtatcttctgcgcatcaggttccaaggaagatataaaacatcttttttccactgtagtgcctttgtttgtatttctggtattctcaatatatccaaaagaccgtatatttttccacttctttctaatatctgctcccagaaaaccgggatcgttgcagcaatagcagattctcgactcattcctgccatgtccttcctcatgcgtctcatatttgtcaaatcgtactgttgtaccttttgatacaatactttctgttgctgacagtactgtttcctttaatttcggttgattatctttcactataaaaatgtagtcaccttctccctttatgactttctctgcaattgtacgctggcatcctaaagcgtcaattgtaataatacaatcttttatacacaacatatctaataattcaggaatgacaactatctcattttccttttcttgtgtgcataactgtccaagggagattcccagttctgttgcaaatgcactaataacatgcaatttgtattttcccgtattcgaatcaggaagtactccttgtttacgacgacgcttgtcctcttcggattcataggctcctcgtatggttttaccatcaatggctatatgacccgaataacatttgagaatgctttggacccattgtctataagattcttcaaattttaaaggatctaatgccgagaaaaagcgattaaatgtatcatgagaagggatgccattaaaattggaaagcttggctgcaaaaaaagattctttacttttaccaaagtcttctattgaattccaagtatcagcgccacatataacagcagaaatggcaataagaacaatggtactggcctgatgctttttacaacgctctatccggttatctatcaatattaatgaatcagcaaattcatgtaggttgctgatctcaatccttcttttagtttcttgcttcattttaattgtgatttataatcacgtaaatgtacttaaataatattgtaaatgaaagataaatatcttattaataagatgaaaagacgatattcatgtaagataaatgtataaaagataaaagaaaaagtataatgcgttttccctgtaagctaccgacatctttacctgttcacggccgtgacaagacctgatcacatccgtgagcagcgtttaccacgaccgtgagcaactcttaccacggccgtgaacaactaacaatgtcggcaccttatcccaactttccttataaggaaagtctactatgtaaggagctaacgggaactttagcactatcttacaagtgattttaccatagccaaccaatgaactccccgcatgctgaaagaccataaacaacaagaaaatctaaaaaaagcgatgcaaaagacggaacctcggttaattttccgtacttttgtatcgcttttaaattaaatcatagaaaaatggacgattcaaacccgcgaacgtgcacttatagtattaattaaagcgatcagagtcattgaaaactgatgcctctgctcgtgtaaacaaacgaaaggaggcaataagatgagaacatatctttattgtgaagctggctttgtggaaaaaccgcaatggcttcctaactgctgggtaaatgtagtatgcccggacaacgatgactttgagtttctgactaaaaccctgaacgtacccgaatcatttctgaacgatatagccgatacggacgaacgtccgcgaaccgacacggaaggcaactggctattgacgattctgcgcatcccgatgcaaaacggtcagaacgaaagtcttcccttcggcaccgtacccatcggcatcatcaccaacaatgaaatcattgtatcagtctgctaccacaatacagacctgctaccggacttcatcgaacacacccgccgaaagggaatcgaagtccgcaacaaactcgatctgattctccggctgatttattcgtctgccgtatggtttctgaaatatctgaaacagataaatctggatatcagcgccgccgaaaaagaactggaacgcagtatccgcaacgaagacctgctccgtctgatgagactgcaaaaaacactcgtttacttcaacacctccatccgaggaaatgaagtaatgatcggaaagctgcaaagtatctttcaggacaccgactttctggacaaggaactggtggaagacgtgattatcgagttgaaacaggcatttaataccgtgaatatctacagcgatatcctcaccggaacgatggacgcctttgcctccatcatctccaacaacgtgaatgccatcatgaaacgcatgaccagcctttccattacactgatgatcccgacattgatagccagtttctacggaatgaatgtggatatccatctggaagagatgccgtatgcctttgcactgattatcctgtgctctgtcgtgctgtcgacattagcgtttatcgtattccggaaaatcaagtggttctaattcaagcgactgccattcaagcagttctaaatctccctttacgtcagagacataaaaaagcagcctgtcattcttaagacctgaattcaaggtcggcgatgacaggctgcacacaatacgttttttgttcgatagagaatattaaaaagagaatgtttaagagagagaaattattttatccttctttactggatttctttccgcccaatggcacagaaataccaacaaatccacttacagaattggtgttcttacctaagaacatgtagtcagttccgaggaacaccggacccaacttcaagcccagaccgaatgacttaccggcagactgaatagccgagtagctgagcgcaacgttaagccagcttttcggacgatagtttgcggaaaatgttacttctgtcagcgttttcggttgcacgaagcgagtcgtagacaatacacctactccgagcttgttctcaaagaagccgtattctgctcctaccacaactgtagatgccagactagacttgcgtgatttatgtacgtcctctgtctgaagttgcaacatttcatagtcgagtacatcaccaccatttacacggttcatatatccgtcagcatcagcctgtagctgagtaatattgttctgaatcgcagtaatagaattaggaatatcgttcgcatcaataccattgacatagctagttcccttcatattgattgattccggattggcagaagctatcttagtggcgcctttcgtccatgaaataaatcccaggtcgagaatagaagcggacactgtcaggttatccataattttataagaaacacccaaatcaatgccgaaaccgtaacctgcaatacccagttttccactgtcaaagtcaaagtcactgatatagtcctgtccatcttcttgtaccaattccaatcctttgaaagaactttccagatgagcatcaacattcagattggcatggtagctttcaatttcagatttcagctttgttataccggcagcatccaatccggacagataattttgatcctgcaattggctgatgcgagcatcactcggaagtttagcgttcatcattacattgttgatcttcagattcatattaccgatacccagcaatactttcaccttaccaccgactgtcaaacggttattgatctgacgcgcataccctaaaccaacttcaccataagcgttaatatccagtttctgaccgctgatatcgtaattgctgtttctccagttatcttcaagcgcatccatctcattcaggaaagtaaacatggaacgggtaaggcttgcacctatatccgcacgaacacctacgttgaatgaccagaagttctttcctttataccatccggcagaaagaatctccgtgcttacgtttacatttaagttgtttttatctttcagacggctcaggaaatcgggattagagtagaaattgtcgctatcgtcaataatgtcgataatatcctgataacccaatgaagtggacccgacagtagcattgaccgatcccaataccggaatattaaaatacccctgagtcggaatcagagccggattcaattgttgccgataatgagtaccttccataaaataagaagtacgtaaaaactgcgcattggcaggtaaaacaaaacccatcataagaagtaaagcccccatcaacttcttagatgcataaagtctgcttgttgtcatgattttatctttttttaattcttgttatcgaacacaaatatatagcatttaagtaacaaataaaagcacaagtcaacacttttttagcataaaccgaacattttcatggctatttggagaaaattcgtgcttattctgcaaaaatatgtagaaagtgaaacaaaagacaatatcagaaattcaggttcaactgcccgtcaccaagcagattgaaggtcattcggtggtaaggggtcgttccacgttcggcgatggcggcacgatgttttttagtcgggtatcctttattcttattccagtcataaaacggatattcttcgtgaagacgattcatataatcatctctgtaggttttagccagtatagaagcggcggctatcgagagatatttaccgtctccttttatcacggtagtatgaggaatgtcaggatatttattgaaacggtttccgtcgatcagcaaatgctgaggacggacagagagctgatcgacagcccggtgcatcgccagaaaggaggcgcggagaatgtttatctcgtctatctcttcgggcgacaccactcctaccgcccatgccagcgcttctttctctatcacttcacgaagtgcgtagcgttgcttctcggtcagttgcttcgaatcattcagcaactcattcttgaaatctttaggaagaatgacggcagcggcatacactgatcctgccaggcaaccgcggccggcctcatcgcagccggcttctatcaggtctttatttaaataaggtagtagcatacttattctttttttcttatttgccacaaagataaaggaaataaaaaaggagacctcattcaaagtcccctttttccgtcattcattcacacaaacaaacaattgttccccaaatatattctaccggttcacagccctagcgaccggaaccatcaccctaccattcgttttacagattttgttcgttgataacatcagcctttccccttagccattatgatagatttcttccatttcccctttataacttataatatatcgtcttgcaaaagtatctaaataataagagacgagaaaatggctttgagcgagtatttgcatgaaatgccccgaaacaggattatctgccggaaaaaagtgattaagtgcgcaaaaaaggtgtttacccggttctatataatcagaaggcgataagcggacttatctccggctatcgccctcttcaataaacaaaccttctcttagttaaaacaaactccaggcaacggtaagccctgccatcacaatggctaccatgctcataagcttgattaaaatattcagactcgggccggaagtatccttaaacgggtcgcccacagtatcgcctactacggttgccttatgcacttcaccgcctttgcctccaaagttcccctcttctacatatttcttcgcattatcccacgcaccgcctgcattggccataaagatagccagcacaaaacctgtgctcaaaccgccgatcaacagtcccagtactccggtcactccgaagattaatccggtagcgataggcgcaaggatagcaatcagcgacggaatcaccatttcgcgctgcgcacccttggttgagatagccacacaacgttcataatccggctcggcttctcctgtcagaatgcctttaatctcacggaactgacgacgcacctcatccaccatgtgtccggctgcgcggccgaccgcattcatcgtcagtccacagaacaggaacgccatcatcgaaccgaggaatataccggaaagaactttgggattcatcagcgtcacgtcgtaatagttcatgaaatcgacaaaggtagcattggcggtagagacgacatcgccgttcggcatactcaggtctattgttcccaagcgggtcagaccgatacggatttcttcgatataggatgccagcaaagccagtccggtcaatgcagcggaaccgatagcaaaaccttttccggttgccgcggttgtatttcccaaagagtcgagcgcatcggtacgcttgcggacttcggcacccagaccggccatttccgcattaccgcctgcattatcagcaatcgggccgtaagcgtccgtagccagtgtgattcctaatgtggacagcataccgacagcggcaataccgataccgtagagtcccatacccacgttggagaagtcgaaaccggaagcaagcaggaaggaggcaatgatgcccaccaccaccgcaatcacgggaatagccgtagaaagcatacccagaccgataccggaaataatgacggtggcaggtccggtctttccgctttcactcagtttctgagtagggcgatacgactgggaagtataatattcggtagaacgtccgatcacaatgccgaccaacaggccgactacgacagcgcatgaaatccaaatccagttgtccaactgtaagagccacaggattaagaaggtagcagccacaatcagcacggaactcaggtttgttccgaatgccagcgagccgagcaaatctttcaccgtcgcattttctttggtgcgcacggagaagatgccgataatggaaagcagaatacctaccgcagcaatcagcatcggggcaataactgctttgaactgcatgaccgtatctgccgaatgtataaaggcggcagcacccaatgcggcagtcgccaggatagaaccgcaataagattcgtacaagtcggctcccatacctgccacgtcgcctacgttatcgcctacattatcggcaatggtggcagggtttcgcggatcgtcttcgggaattccggcttctaccttacccacaaggtcggcgcctacgtcggcagcttttgtatatataccgccacctacacgggcaaagagcgcctgtgtggaagctcccataccgaacgtcagcatcgtggtagtgattacgcaaagtttatgagtcggtgtcagtgcgtcggcgggaatcaccgcgttcagcaacagataccagaaagatatatcgagcagccccagtccaactactacgagtcccattaccgcaccactgcggaaagcgattctcagtccggagttcaatgaattacgtgccgcattcgccgtacgtgccgaagcataggttgccgtcttcatacccagaaaaccggaaagaccggagaagaaaccacccgtcaggaaagctatgggaacccacacattctgaacatgaaagccataagccataattgaaaacaaaataaccagcccaaggaaaacacaacctacaatcttgtactgttgtttcagataagacatagctcccttgcgtaccgcagcggctatttttatcatttggggagtaccttcactctctttcatcatctgcttatggaagtaataagcaaaacagagggctaacactgaagcgaccggaaccagccagaaaagaatgctatccatagaattaattattaaagggttttatggaggctaaaagtatggaaatcaaacgaaaaaagcaagcaaaagagaaaaaaaaatccaacttgccgattgatgcgataactctcaatgaaacgaaggtaaaacaagtaaaaaagtcttttgagaatcctgcaaaagagcatcaggccaatagctcgttagttaatttttagtcttattacgttaatcgttaacaaacccgttatttctattaaaccatgttataaagcgcctcactttgccccgaaaatttggagatagccgaaaagtccctatctttgtagtgtgtttttcatagtattagatttaaggttaacaaaagattggctgtctgggatagatagcctttttttatgcccgcaaactaactattgcctgttaaactacagggattggatgccaagaaaatgtataaggtaaaagaaatcaatctgatgccgaatagtaaatccagcctggctgccaacgaaaagacttattccagtgattatctgatgaaagtgggcatagatgctttcaccactaatcaagcctttagccgcgtgattgagcttacggcagataacttcctactgccttactcatgccaagcctttggcacgcttgtgccaagggcttggcatagcagtgccaacgcagtggcacaactgtgccaaaggcatggcacaaacattaagaacaaaaggggaaacaccgttcgtggtgaatcccctttctcatacaataaaacaatcaactaatcttcaatcgttacagcagttccgttggcagttaccatcagcatactaccgctgcctcctactgtttcataatccagatcgacaccgatcactgcattggctcctaactttgctgcctgtgcctgcatctcctgcaaagctgtatcttttgccatacgtagtacttcttcatatgcaccggaacgacctcctacaatatcccgaatacttgcaaacaagtcacggaatacattggcaccaatgattgtctctccggaaacaattccgtagtactttactattcgttttccctcaatgatgggagttgtagtcactaacatgatctttttcttcttttttagttgtttactatcctattagacgcaggatatccccaaaaggttgcaatgtcaccctaaaaaaattgcagctataccgcaaatcaatgcgatatagccgccaattagagttaaagagagagagaatttatagaaagcgcggtctcacgaccaacttaatatacctaaaatgatttttattctttcttattagacgcaggaaacttcaaatcactgcacttcaaagagacttttttagttaaagaataaaaaaaatcgctattcttgcaggaatagcgattaatatctttagaacatctggctgacgcgttcgatcccagccactaatgcgtccacttccgatcgtgtattgtacatggcaaatgatgcacgtaccgtaccttcgattccgagccgttgcatcaacggttgcgcacaatggtgccccgtgcggacagcgatacctaaacggtctaacaatgttcccaaatcgaaatgatgaatatctcccaccagaaatgaaatcaccgctccccgatctgccgcctcaccgaaaatacgcatattgggtatttccttcaatcgcttcagcgcatacgttgtcagctcgtgttcatgagcagcgatttggtcgagtccgatgccattaacatagtcaagggcttttgccagtccggtagtaccgatgtagtccggcgtaccggcttcaaacttgaaaggcagttcgttgaaggtagtcttttcaaaagagacgtgctgaatcatttctcctcctccttgataagggggcatacggtccagccattcttcctttccataaagcacaccgacacctgtcgggccgtaaaccttatgtgcggagaacaccaggaaatcggcatccaagtcttgcacatccaccttcatgtgggggatagactgtgcagcatccactagaaaaggtactccatgcgcatgagccgtcgcaatcatttccttgacaggatttacggttcccaatacgttcgacacctgaactacactgactatctttgtacgctcggtgaataacttttcatattcatccagcaacagttcgcccttgtcattcatcggaatgaccttgatggcaattcctttgcgggcagccagaagttgccagggaacgatattactgtgatgctccatcaccgaaaggatcacttcatcgccttcctgcataaactcatctccaaaactggaaacaagcaaattgatactttcagtcgtaccccgtgtaaagacgacctcattcgtgctgccggcattgataaactgccgtaccgtctcgcgggaggcttcatgcagttccgttgcctgctgggaaaggtaatgtactccacgatgcacattcgcattcacagagtaatactcatctaccagcgcatccaccaccagacgaggtttctgagtggtcgcaccgttatcgaaataaaccaatggtttaccatacaccgtacggctcaatatcggaaagtcttcacgtatcttttgaatatccattttacttattcatcatttacatattgcacatccctggcacttgttcagttcgccacggaagcgtttttctaccaacaggtgcagacggtctttcagtgcatccagacgaatcgtatcgatgacttcattgacgaatgcaaacatcagaagcaagcgtgcttctttctccgctattccgcgtgcacgcatatagaacaaagcattctcgtccaactgccccacagttgccccgtgagagcatttcacatcgtccgcatagatttcaagctgcggctgcgtgtacatacgcgcatcgcgtgtggcacagaggttgcggttggtctgttgagaatttgtatgctgggcatcaggacgtaccaataccagtccggcaaaagcaccggtcgactggtcatcaagcacgtacttgaataattcattactggtacaattcggtactgcatgatcaatggaggtgttattgtccacatgctggtttttatcagcgattgccataccgcaaagattaatctcagccccttcgccggctagcagaacttccgttgtattacgggtagttccgttgtgcagcgtcatgccattcagcaaaacattgctgtttgcttcctgcttcacgtacaggttactgatacgaaccgtacttgtatgtgtttcttcaagctcatacatatcgaataccgcattctctccggcaaatacttcgatcacctgcgttgcaaggaagttcacattatccatcgcatgatcacagatcaacaggcgtgcctgcgctccatcttccaggatgatcagcacgcgacggttcaccatgaagttaacatctgcacgaaggatattcaccagctggatgggcttctctacgattacgttcttcggaacatagaagatgactccatcctgcgcgaaagctgtattaaaagctgttatgccatccttggaggtatcagccagcttgccgtagtacttttttaccagttcgggatgttccgcagcaacttctttgaggctgccgaagatgactccttccggcaaatgagttttaggaagcactttattataaaatgcgtcgtttaccacaaaatacaaggctgtgctcatattcgggacatcgcacttaaacacttcgtacggattgaccggaatctgaaggcggttaaggttcagaccgtaatcgggctcgaaatacttgcttatatccgtgtatttatacttctccatcttacgggtcgggaatccgagacgctcaaaatcggcaaaagcagccgcacggggtgcattcagcacttccgcactatgcttgcagatcatggcttccgtctgagagaagagatctatgtattgttgttctacattcatcgttattctcctacttctttcttaatccaatcgtatcccttttcttccagttccaaggctagttccggtccggcggttttcacaatacgacctttatagagtacgtgcactatatccggtttgatataatcgagcagacgctgatagtgagtgatgacgatcgtacttgtttcgggagtcttgagcttattcacgccttccgctacaatacgaagggcatcaatatccaaaccggaatctgtctcgtcaagaatgctcagacgcggttccagcattgccatctggaagatctcgttacgcttcttctcaccaccggagaaaccttcattcaccgaacggttagcaagtttattgtccagttcgactacggcacgcttctcacgcatcagtttcagaaattcgctggcagtcaacgcaggcagacctttatacttgcgttgttcattgacagccgcccgcatgaagttcaccatgcttactccggggatttctaccggatactggaaactaaggaaaataccttcatgactacggtcttccggactcaactccagcagattcttgccatagaaagtgaccgaaccttttgtcacctcaaaagcaggatttcccaccagaacagaagaaagcgtactctttccggaaccgttcggccccattatcgcatgtacttcgcccggtttcaccgtcaggttaatacctttcaatatctctttgccattaatgctggcatgcaggtcttttatctctaacataagcttatttattttttatcccacgcttccttccaacgaaatagtaagcaacttctgtgcttccaccgcaaactccatcggaagtttatttaatacttctttcgcatatccgttaacaatcagcccgatagcatcctctgtcgggattccccgctgattacaatagaatatctgatcttcgctgatcttgctggtagtcgcctcatgctccaccacagccgtctcattgtggatatccatatacgggaaagtatgcgcaccacatttatcacccagcagcaaagagtcacattggctgtaattgcgtgcattatcggctttttcagctacacgtaccagaccgcgataagagttctcgctatgtccggcagagatacctttgctgacaatcgtgctgcgggtattctttcccagatgaatcatttttgttccggtatctgcttgctgataattatttgtcacggctacagaataaaactcagccgtcgaattatcgcctgtcaatatgcaggaagggtacttccacgtaatagccgaaccagtttccacctgtgtccaggacagtttgctgtccacccctttgcagttgccgcgtttcgtcacaaagttatagactccacctttaccttcggcatcacccggataccagttctgaaccgtactgtatttcacttctgcacgatcatgtaccacaatctccacgatagccgcatgcaactgattttcatcacgcatcggtgcggtacatccctccagataagatacatacgaatcatcgtccgccacaatcagcgtacgttcaaactgtcccgtgttacgggcattgatacggaaataagtagaaagctccatcggacagcgtactcccttcggtatataaacgaaagaaccgtcagagaacacggccgagttcaaagcagcgaagaagttatcccgatagcctactaccgagcccatatacttcttcacaaggtccggatgttcccgtaccgcttcactaaaggagcagaatataatgcctttctccatcaacgtctctttgaaagtagtctttacggataccgagtccatcactgcatccacagccattccgctcaatgccatctgttcttccaagggaatacccagtttattgaatgtctttatcagttccggatctacttcatccatactctttggtccttctttcttcttcgtcggatcggcatagtacgaaattgcctgataatcgatctccggaatacggagatgtgcccaagtcggcatttccagcgtcagccaatggcgatacgctttcagtcggaactccagcagccattcgggttcatcttttttcgatgaaatcagacggactacatcttcgttgagtccacgctcaataacatcggtgtgtacttccgtggtgaagccatatttgtacttctcctgcgtcagttcctttacatatttattgggttcttcttgttgcatctttattatctaatatatattgttgcgttatattcttagcagcagggaaaaagattcccgcaaacgtttccataggataatataacaatgattcgctcttttttgttgcactaattaacttattatcgctatcgataaactctatcacacagatcacaaggctcgttagcaacagaaatttgagtgctcccaatccacttcccagccaacggttcagccaccccagtgaaatagcttccatcgctttcgtcagcaaggacgccactaacgtgaatatcagcggaacagcgatccagatgacaataaaagccaatacctgtgcaaccgtcatcgagtccgtcacagccggacaaagcttctccgccaacgttgcatacaaagcctttgctgccagcaaaccgacgaccaatcccagaatagaagccagctgacggataaagcctttcataaaacccgccaccacaccggcacctattataataaggatgattatatcaatcgttgtcattatctctttttaaaagaaaaaggaggcacggagttgtaaatccactctgtgcctccgtatattcccgattcagtacaatttataacgtctgtttcacttctatttcttcgaatgtctcgatcatatcgcctaccttcatgtcgttgcagttcaccagactgataccgcactcgaagtttgtacctacttccttcacgtcgtccttgaagcgtttcagtgcattgatgtttccggtgaagataacgataccatcgcggatcagacgagccttgtcgcttcgtttcacttttccggtcttcactaccgcaccggccacaagtcccactttcgtgatattgaacacttcgcgaatttcgatcgtagctgtaatctgttctttcagttccggagccaacataccttccatagcggccttcacctcttcgattgcatcgtagatgacggaatacttacggatatcgacaccttcctgttccgccatcttagcggcagcacccgaaggacgtacctggaatccgacgataatcgcatccgaagcagcagccaatgatacatccgattcggagatagcacccacgcctttatgaatcacatttacctggatctgttcagtagacaacttgatcaacgagtcgctcaatgcttctacagaaccgtccacgtcacccttgacgatgatgttcaattcctggaagttacccaaagcaatacgacggccaagttcgtccaaggtcaggatcttctgtgtacgcaagccttgttcacgagccagctgttcacgtttgttcgtgatctcacgggcttcctgatcgctttcaactacatggaacgtatcacctgcagcaggagcaccgttcagtcccagaatcaatgccggttcggccggtcccgcttctttcacgcgctgattacgttcgttgaacatggctttcacacgtccgtagctggttcctgccaatacgatatctcctactttcaaagtaccattcgataccagcacggtagctacataaccacgtcccttatccaatgaagattcaatgatggatcctgttgcattgcggttcggatttgccttcaaatcaagcatttcagcttccagcaatactttttccatcaaatcttccacacccatacctttcttggcagagatatcttgtgactgatatttaccaccccattcttccacgagatagttcattgcagccagttcttctttaatcttgtccggattagcagtcggcttatctaccttattgattgcaaatacaataggtacacctgctgccatcgcatgattgatcgcttccttcgtctgcggcatcacgttatcatcggctgccacaataatgatcgcaatatccgttactttcgcaccacgggcacgcatagcagtaaacgcctcgtgtcccggagtatccaggaacgtaatacggcgtccgtcttccaactgtacgttgtaagcaccgatgtgctgtgtaatacctccggcttcaccggcaattacattcgccttacggatgtagtcaagcaaggatgtcttaccgtggtcaacgtgtcccatcaccgttacgatcggagcacgtggctgcaaatcttccggagcatcttcttcttccacgatagcctgtgccacttccgcacttacatattcggtcttgaaaccaaactcttcggctaccagattgattgtttccgcatccagacgctggttgatggaaaccatcataccgatactcatacaagttgcaataacctgattgactgatacgtccatcattgtagccaactcgttagccgttacgaactcagtcagcttcagtaccttgctttctgccatttcctgatcttccagttcctgcatacggttggaagccatttcacgtttttccttgcggtacttagaagtcttgttcttacccttggttgtcagacgtgccaaagtttcttttacctgctttgctacatcttcttcgctaacctcctgcttgataaccggcttcttgaagcgatccttattattattcttcttgttattattattgccctgtccctggccttgaccctgaggacggggatggttaccaccacctttaccggtctgagtattgggtctcggagcagcaaagttggaagttgccacattgttgacatccaccttttctttgttgatacgattccgtttctttctggcagcatcggcattattatcttttacgcccggttttgcctgtttactgtcctctttacggatttccttgatgatagcttccttcatcagtttcttctggtcctgacgaactttttctttttcttcgcgttcacggcgtttttcttccttcgatttcttcttaggacgggtagactggttcaatgcagccaggtcaatctgaccgatgacattgatcttcgctcccagttccggttgacggattttaaacacctcattttctttcgacgcattttcttcagtcggagttgtcactgttgcagttacttctgccgttctttctactttacgttcttctgccttcacaggtgcagtttctaccaccttcggctcttctttctttacttcttccactactactttctcaacttctaccggttttgtctccactgcaggtttcggcgctactactggctgttctaccggagcagatgccggtgcaggtttcggtgcaattacttccaccttttccactttcggctcttcctttttcacttcgggttcaaccactggtttctcaacgactgttttttcagcaacgggttgctttaccacaggttgttctactacaggttctactttcttttccggcgctttttctactttatctgttctccgaccgctgaatttatccaaatctatttttccgacaggtttaaacttaggacgtgcatcctccggtacgactgtcttaatcacatcttccgacttcggtttctcctgctgcttctcgaagccctcgatagataccgatgccttattacgttccttattctgacgttcctggatgaaacgctccgattcaagtctaaggttcttgtctgtactaaactctttaacgagcacagcgtactgctcctcactaattttggtattaggattagcctcaacggtataccctttcttttgcaggaactcaactaccgtcgcgattcctacattcaaatctcttgtaactttgtttaaccttatcgtcatatttaaaatttaatgaataaatggagcgaagaaaattcaatcgtaatgcatattactcttgtgttggttcagcttcaggttccgcctctgtctcaggctccatctctgctgccggttcttcttcaaactccgatttcaaaatacgtattacctcgtccactgtctcttcttccaggtccgtcttttcaatcaacatctcgcgaggcgcattcaacacagccttcgctgtatcgataccgatagccttgattgcatcaatcacccatccgtcgatttcatctctgaactcgtcgagatagatatcctcgtcagccacattctcatccaattcacggaacacgtcgatagtgtactcagtcaacatactggccagcttgatattcaaaccgcctttaccaatagcaagcgatacctcttccggtttaaggaatacctcagcctttttctcttcctcattcagacggatagaagaaatcttagccgggctcaaagcacgctggataaacaatgaaatgttcgatgtataattaatcacgtcgatattttcattgcgtaattcacgaacaatcccatgaatacggcttccttttacacctacgcaggcgcctacgggatcgattctgtcatcataagattccactgcgatcttggcacgttcgccagggatacgggcaatctttttaatggtaatcaaaccatcattgatttcaggtacttccatttcaaacagacgttgcaggaaaacgggagaagtacgtgacaaaataatcttcggattattgttcttgttgtctacgcgggcaaccactgcacgggctgtttcacctttgcgataaaagtcgctcgggatctgttcagtcttaggcaacagcagttcgtttccttcatcgtccagaagcaacatttcctttttccagatctggtatacttccgcgttgatgattgtacctactttatcaatatatttattataaatactgtctttttcaagttccagaatctttgaagccagtgtctggcgaagattcaggatagcacgacgtccgaacttggcaaagatcacctcatcagtcacttcttcgccttcttcgtatgaagcatcgattttctgtgcttctgtcagcgaaatctgcatattggggtttgtcaaatcttcatcggccacaacttcacggttacgccatatctcgaagtcacccttgtccgggttcacgatcacgtcgtaattctcatcggtgccaaacattttcgcgattacgctacggaacgactcttcaagtacgctaaccatcgtcgttctatcgatattcttcagttccttaaattccgaaaatgtatcaatcaagctgattgtttcttcttttttggccataactatttaaagctaattaagtatttagtatattttatttgctcataagtgaaggtttcgtcctcttcgatcagcttcggacgcttggaaccttcgagttttaccttcttctctacgcctaccgtaaacttctcttcatcggcatctttcaggatacctgccagtttacgtccgtctctggtcactacttccacctcttgtccgatgtggatgtaatactgttgcagcactttaaagggttgtccgataccggcagagcccacttccagttcataatcttcctcttcacggttcagtttcgactcgataaagcggctaagctctacgcagtcttcaatccaaactccttctgcgtggtctatttcgaccacgatcttgtcatccgggctcacggtcacctctaccagaaagtagtcttttccttccagccactcttcaacaatctgacaaacagttttcttttctatcatttattaactatataagaacaaaaaaaggagcttaatcgcccctccacctttcatccatttcggttgcaaagatataaataatctattcgactacaaaacattaaagaaaaaaagtatgaattaacagtcgtatatcaggcacaaacaccaatatctaatcatcaacccaggaattcagatagttttgagaatccttacagccttgagctgcggctttttggaaccactttttagccttggctttatctactgccactccctgaccgtaaaacaacatggtagcaaccgtaaactgagcggattccacccctctctctgccgcacgacaaaaatatgggaacgatttcgcaatgtcttttctcactccatgtccgttataataaattgagcccaaattattcagcgccaacggatagtcactctttaccgcctcttcataatattcacgcgcgacatcgtaatctatttccacccctttgccaaaatggtacatcattcctaaattataagcagcggcagcttctcccatacttgcagctttcaggaaacactcctgggcatcttcaaattttccttcatccaggaagataattcccaaatcattgatctgcccggaagttatatttttagctttcatcagatattgcttttcagccgtagccatatccacagaaataataactgtcgaagaattggaaaaagatccgctatattcacatttcacttttttcccgtactcacagctataaacttccagctgatagaaatcctcactgacagaatagttaccagtttcataagcatccagttttccttttctctcaccattcaggaatatttcggcagcatgatcagaagttactttcactctccgcttaacgaacagctgattgagcagttttccgaataacccctgcgcaccggcattactaccgtctgcagaagcgacattcgaagccggttgaaagccgggaggtgaaattgtatccacagccggatgttgcaacagatcaagtatgaccgcagccagctcactaaacttctcttccggattaggataagcattcagccagtgtttatcattcagcatcagtttcatagaccctttcagatcagtaggatctatgcggaaaggtataataggcttattgctgctaaagccaatattcagttcactacgcacccagcgggatatttgagacgtttcagaaaagacaatcaggaacactttacaggtcacaatagcttcttcaataatatcaccatactccgctccgggtcttatgtcacgcggagccatccaacacttgatcctgttactttctaatgcatgacatattgcctgtgccgtctgtatattggcacttgaatagctaataaacacttcatgatccataatctttattgtatatattcaacttaggtttacacactccacgacaccgatacaatcctgaattcagacggatgttggttgctaagataatgaaattcttagtaatacaaaaaataattgtatctttacaccgcaataattaaaaatacaacggctatggcacatcatctcaacaccaacaaacagtttatggtcggcaatggcattctggcttttgccgtcatttttgtcgtagttattttcatttatatgagcttacgcctgcaacgggaaaaccaggcagaacgacattatattgaaacttatacgatcagcctggtaaaaggatttgccggagattccatttcgctgttcgtcaatgacagccttatcgccaatcaagtcatgcaggaagaagcctttacggtagaggtcggtcggtttgcagaacaaagcgcactgatgattgtagacaataaaacggaaatagcatccgttttcgatctcagcgagaagggaggaacttatcagtttgaaaaagaaacggacggaatcaaacagcttgctaaataagagtctgcttaatatcaggagttccttatcccaagcatcttatatctctgtgcgatacttcttcaattctttacgcaaagcaagggccttgccatctgtgaaccggttcagcaagtcccagaaacgctcaccgtgattcatctcacgagtatggcacaactcgtgcagaagcacatagtcgatcaggtgggagggcaacaggacaagataataggacagatttatattttttctcgccgagcaactcccccagcgtccctggctggagtttatcttcacgctggcataagacaatccacattgcgccgaaagatgctccaaacgaggaggaagaatacttttcgcattccgcctcaaagattcttcaatcactttacgcaaccagttctgtaaattttcatcagtaaaatccgcttgaggcggacaaacgatctgcatgacacccaatcgcgaattagccaaaaactgctccttttcacctaagatgagagatagtttgaaatgctcggcatcaatcttatagtccaagtcaatcaacggacgggcaaccttctgacgggaaagcagcaacttactacgaagattctcaatagcacgcttcacctctttcgtcgtggtgccgggaggtacagaaacgtagaccgcatcgcttttggtacggaacaccaaactgcgggcacgtggattgacacgtactatcaaacttcccaattcatcatcttctatcactgtatccattttctcctccttaaccgatgctgcaaaaataataaaaaaagaagccggtggcgaaaaaagtgatattcaatgcaactttatagtaactcgcaacgtctaatccatataaactcatattaaaatcaactatcaattatgaaaagaaacacattgactgcatggctgctcggaataattctgatattctccgccacctcctgttttaatggccctattgtgaaaggcagtaaaaactacatcaccaaaaaagagaatctggaacatttcaatgacatcagcatgtccggaagtgccaacatcatctaccagcaagactcctcctcccgcatcgagatttacggttcggacaatatcgtagaactcctggaaacaaaagtaaacggaaaaacattgaatataaaatttaaaaagaatgtcaatatcatcgacaagggcaaactagagatcaaagttttctcaccggacctgaacggactgacactcaacggatcgggtggcattctctttgcgaacggcattcacaccgagggagatcttaaagtaacgattaacggttcgggcaatttaggaggaagcacattcgataccggacatctggccatctcaattcatggttcgggtgatgtcagactcaaacaaatcgacagcaaaacctgctctgcaagcatttccggatcgggcaacatcacccttgacggcatgacaggcgcagcaaagtacaacatatcaggttccggcaatatcaaagctgccgacctggaagctacggacgtatatgcaggtatctcgggttcgggtaacatcagctgcttcgtcaacggcaaactaggcgggcacgtcagcggaagcggcaacgtcgcttacaaaggaaatcctcaggctattgatttccctcacaagaagctccgcaaactagactaaatccataaacatcccaaaaacataaaagggctactgcatctcgcggtagcccatttatttagttagtttcattataaaaaatttgagagaattgaaaacttcacagtttcgctttcgatgttgttttaattaaagcacactaactatattatatgtttaaagcaaatgaaaatgtctattctttcataacctgcaccttgttgatcttcgcaaggctgtcagccaatgcctgatctgctttcagctcatttgacagagctaccgacggtgcggtcacctgtttaccaatggtatccgttgccaatactcttccatcatctccggaaaaagaatgttgcgctacatttcctaatgaaaggatgattgcaatcacagcagcggccttgaacagggggatgaatcttcctgtcagtgtcagacgctttgccttcactaccggagtttccacctgtgccagaatacgtgcgtcaaagtcttcgcccagtcctacctcctgctgaacctgctgataaacaaacaagtttttatagcggagcaaatgagcgggtacttcctcctttgtgaagaagtcgcgcaacacagattcctcctccacggaagtttcgcattgccaatatcgctccaggagctgttctatatccttataatccatattcgtcaatttctaaatacctttgttttaccttttgtctggctctgaaaaggttcactttcacttgttcctctgtcagattcagaagggttgcaattttcttatagctttcaccttcaatgtccctcagttgcatgataagccgctgtttttcgggaagttcgttcaccagtctattgataatgttcattttctcatcatgaaccaactggtcatacggactgtttgcatcaggttcttcctccatttcgggggtgatttccacattctgagcttctttcttctggctccggtctatagccagattctttgccactatcaggcaataggcttcaaccgattcaaattgcgaccactcatcacgcttgttccacacccttatcatggtgtcctgaacgacatcctcggcttctgccctatccagggttattctgagcgccagtcgaaagagtttatccttcaacggcaaaatatcgtttcggaagctgatctcttgcatctctataataatgacgggctgggatacgaaaagttacagacgcccattacttttttttgaattatttttttatccgcgttccttcgttgtctttaatcgctgatgctaaggtaattacaacttctgtaactcctgcattaattgcttcaaaagaattctccaacttaggaatcatgccaccttgaataacgccgtcagcaacgtattgttcgaattcggcacgggtaatctcagggatcacactatcgtcatcattctcgtcacgcagcacacctttcttttcgaagcagtacaccagcgtcacgtcaaacagcgccgacaaagcctttgccgtctctccggcaatggtatccgcatttgtattcagcatattaccttgaccatcgtgtgtcaacggtgccatcacgggcaccactcctttatgaatcagatcagccagcaaagaagcatctaccttctccacatcgcccacgaaaccataatcaacctctttcaccggacgctttaccgatcggattacattcatatccgccccagtcagtccaagagcgttcactccacgggcctgcaacccggcaacaatattcttgtttaccagaccaccatacaccatcgttaccactttcaacgtttccgcatcggtaatacgacgaccatttaccattttgctttcaatacctagttgtgcggcaatctttgttgccgagcgaccgccgccgtgaaccagcactttatgtccgctgatggcggcaaagtcattcaacaactgaagaagggtggcttcctcttctacgatttttccacccaccttaattacagttagtttttccctcattttttattcaattctaataagtttgccgaatggagaactcagctccggcaccttgtcggttattctaagtaagtatagccgtaaagtcccgaacgatagttggacagaaactctttaccctcttccaatgatatctttccttcttttacagacttggtcacccatgtttcaagggtacgtaccagttttttaggattatattgtacgtaatccaacacttccgctactgtctcaccatcaataatctgttcgatattatatcccttttcattcacagaaacgtgaacagcattcgtatctccaaacagattatgcatatctcccagaatctcctgataagctccgaccaggaaaacagccagatagtaaggttctgttttcttcagactatgcacaggcagataatgagccacattccgggtagaaatgaaatttgcaatctttccgtccgaatcacaggtgatatcctgcagggtagccgaacgctccggcttctcatccaaccgctgaataggcataatcggaaatatctgatcaatcgcccaagagtcgggcaaggactggaacaatgagaaattacaaaaatatttatccgccagcaacttggacaatccccggaattcatccggcgcatgtttcaagcctccggcgatctgattaatttcccgcgtaatggaccaatacaaacgctcgatctgagcacgggtcttcaaatccacaataccatgactgaacaagtcgagcgcttcttcccgaatctgttgtgcatcatgccatgcttccagcatcttattctggttcaacgaatcccagatactgtacagttcctgcacaagttcatgtgcatccggagcgatttcctcttcatcatcccattccggaagagtagctgtttcgagcacctcgaagatcaagacagagtgatgagccgtcaatgcccgtccgctctcggtaatgatgttcggatgcgggatgccgtttttatcgctgacatctaccaatgtagaaatggagtcattcacatattcctgaatagaatagtttacactaccttcactattggaagaacgggttccgtcataatcaacgcccagtccgccgccgatgtccacaaactccacattgaatcccatagagtgaagctgcacgtaaaattgagaagcttcgcgcaaagccgtcttaatgcgacgaatcttcgtcacctggctgccaatatggaaatgaatcagtttcaggcaatctttcaagcccttgctttccataaagtcaagcgcttcgagcagttcgctggaagtcagaccgaacttgctggcatcaccgcccgattcttcccattttccactgccggaagaagccagtttaatacgaataccgatattgggctgcacattcaactgcttcgccattttggctatcagtttcagttcgttcatcttctctactacgaggaagatacgtttgcccatcttttgggcaaggagtgccagttcgatataactttcgtctttatagccgttacaaacaatcaatgagtcagaatccgtattgacggcaatcaccgcatgaagttccggtttggaaccggcttccagtccgagattgaatttctttccgtggctgataatctcttctaccacaggacgcatctggttgaccttaatgggatagatgataaaattctcggctttatacccgtactcttcggcagcctgcttaaaacaggaagacatcttttcaatacggttgtccaaaatatccgggaaacgcaacagcatgggagatgccacatcccgcaattgtaactcgtcaaccagttccttcaggtcgacggtcactccatctctccgcggtgtaacaacaacatgacctgcgtcattaatactaaagtacgaagtaccccaacccgtaatgttgtagagttcttcagaatcttcaatacgccactttctcattttctgttattcagtgtttttagtaaataattggatggcaaaaatacagatttatctacaggctgccaattaattggatattatttctttcaattggtctatataaccggtcttaatttatatttccaacagttcctgcaggcgttgcacagacgattcaatctgccagcggtcttccagttcgtccgcattaaagatatattgcgcctgcgtataaaaaggtgcacgcttttcaagcgcctgaatgatgaaatccattaattcatcatcttccttttcctgaagaatgggacgttgctgcttggcaatacgcaagcgtctgaacagcacatcgggatgtacattcaagaaaacggttttccccgtccggttcataaactccatattgtcataaaagcagggtgctcccccgcctgtagagataacgacgttctcaaactcagctacctcatgaagcatatttctttccaactcacgaaatccggcttccccccgttccgtgaatagttctccgacagttttatgaaaacgttcttcgatataccagtccagatcaatgaacgggacattcagtttgcgggcaaaagccttgcccaaagtagtttttccggcacccatatagccggtaaggaagatacgaaccataaatgattaattttgctcacaaaattaatcatttaatgaataatgaagaatgattctctattatttaaaaacttttatccgttcttccagtggctggaactctttttctcccggcttattgacgggcactccaaacggcatttccgcaatcagatgccaatgtgcaggcaaattccatgcccgacgcacctcatcatcaatcaacggattataatgttgcaaggaagcaccgaagcccacatcttcaagcatgacccaaacagccagctgatgcatcgccgaggtttgtaatgaccatccggggaaattctcctgataagacgggaaagcttcctgaagccccttcaccaccttctgatcttcaaagaacaacaccgtaccatatccacaggcaaaggaattgtcaatcttttcttcggttttcgcaaacgcttctcccggcacaatcttcctcaacgcatcttttacaatgttccataactttttatgagacttgccaagaagaagcaccacacgggtagattgagaattgaatgccgacggcacgtgtctcacagccagattgataatgcattctatctcctgatccggaataggtgactggtcggtaatcgaataataagtccgacgattcttcaaagcttcactaaaagttctttccataatggctcctttcttaattttattttcttaaactccttataaattagaacaagcttctctgccaacttgttcgattccggaatatatttgtaccttcgcaccgtcaatgctgttgacataatcattcattatcagaaaatggctaaagaaaagttctacgtagtatgggaaggagtgacgccgggagtatatgcttcctggacggattgccagctccagatcaagggttatgaaggtgcaaagtacaaatcgtttgacacccgcgaagaggcggaacgtgcactggcctcgtcaccttacgcttacatcggcaagaatgcgaagaaaaaaacggaagctgcccgaaccggttccgatacactgcctgcttccgtcattgacaatagtctggcagtcgatgctgcgtgcagtggcaatcccggtccgatggagtatcggggagtacacgtggcaagccgccaggaaatttttcatttcggcccgatgaaaggtacaaacaatatcggagagtttctggccatcgtgcacggactggcgttgctgaaacagaaaggatttgatatgcccatttatagcgacagcgtgaatgccatcagctgggtgcgacagaaaaaatgcaaaaccaaacttccccgaaatgaggaaactaaagaactgtttaaagtaatagaacgggcagagaagtggctcagagagaacacttacactacccgtattcttaaatgggaaaccaaggcgtggggagagattccggcagatttcggcagaaaataatagccggaaagtctattctgcgacttgatcagcagcctgttccttcttatgtttaaacacaaagcggagcatcagaaaattagtgggaacagccacagcgagcacacacaagggagctatctcctgatctacattcagatacaggaacaaattgaacaatcccatatgtatcagatagttcaccaaatggctgcctccaaatcccaaagcccttttcaaagaagggttgctacggaacgtgaaataagaagtcagaaagaaattacagataaaactcgtcacatagcctatcgtgtaggcaatattcaagttggtcatttcgtattcctgcaacagataataaaccccataatgtattccggcggccaacgttcccaccgtgcaataacgaataaactggtagcgtttactcttcgattgaaatactgattttacaatttccattagtaagtagttttagttttatagttcagatgtttcattttcattcagtcagatggacgcacgaagtcctgagtcagttgttcccacactattttcagccatatcaaggtgcaaggcaaagcctttaaagcataaggcttcacataatccatccttatgaatcttgggaaaagatcggtagtagacaaagaagtcagtagaatacagaatataagtagaaacaagtttaaccccggtgtagtggcctgtgtaggtgtctttacataccagattccaacagcaatcatagcagtcagatagccataggtttcagtgccggtgctaaatagcaccataaacaaaagtgcagaggatagaaacaagaatctgaaagattcatttccgtattgccggatgcgtaaataaggaagggcaaacaaaatcattccgggaacgattatccataaatcactgaaggaggctcccgttatccgatgtaacatacccagcaaagatatgttttgattgacgctaaactgattcagcccattcttatagacaagcacatcgaaccattctttatacgaatgaacgacatattccggagaagcatagagcatcggaagcagaaaaacgatcactgcccaaaagactaatccgctggtgagtttcattttatgtttcgagaataaaaagaaagccagtccgactatcccataaagtttggtcatagtccctaatacaatcatcaaagcagcccaaaaatccttttctttctcgatcagcacatacgagaatataatcatagcggtaatacctatgctatattgctgagacaaaacagctgtaaaaacgtcatttacagaaactaatataacaacagcaaattgccactttttcaaatctaacttgctgatagcataataaaggaaaccacaattcaccagacaccaaaagaccatccccaagggtctgggaagaaccgcaaaaggagaaatcaatgcagtgaaagaaataccatacagaaaaaaatctttctgttcctgaagatattctacatataaaggagaagaagatatcgcatgccaaaaagactggctaaatataacataattgctatatgtccccttcatcatcaatgataaactgcaagctaatcctactcccatccacaagatgaatagaaagacgggattctgcacatatcctttcaacctctccaacatatcatcaataagttttttagttcatttacaaataccccctttttcatatcaggcaacatcacttcgcctcttaagtctacaggaacctctttgatgaaggtggtatcatcaagagaagccttatatataaactccgtatcaaataagaactgtttaatacgagtggacgcaagaaaagcttttcccttacagttaaacccctttaatcccccctgcgtatctgtgtgggtcagccctaacagcataaagttcaagaaacgtgaagcatgactcgccaactttctacgggtagaaagttgtgaataatacgtatgattacgatttgctacaactacatcatacccttcctcaagatatttaatcacctgacaaacagactcaatcttatatggaaaatcataatctgtataaagagccagctctgaatcagaatgtgctataccatcacgaacagcagctcctttcccttgatttatcttattgtctacaatgatagtgttgggtaagttatttgtcaaacgaagtacagcttcttccgtaaatccgcgtttggaaccatcatttactacgataaagcgaatattgtacccgttcagcatcccttccaactctttatgtttctcaatcagttgctgctcccatccttcatgaggattataacagggcaatatgacgtcaatccgttcatcatcttttttatgtagaaaaggagttggggttcttgatgtatagtcctgagttaattgttcccagatgattttaaaccagataatagcacatgggagagctttaagtgcaaatgaagttatgtattcagtcctgaaatgttttgaaaaaagaatactgcttgaagacgctgccgtcaacacaaaacagaatagcaataagcatgtattcagcacaaacgattttttatacgttggcgtacttacataccatatacccacaccaattagagcacccacatatccacattcttccgtccctgtactaaacaagaccataaataacagaactgatgccaaaaacgaaagccgaaaatttctattctcatattgtccaatacgcaaataaggcaataagaataaaacaattccaggaattatcagccacatatcgctatattcaacagcatgagtaatctttcgaaccattcctaataaagagatattctgataaaagctcaactcattaacatcattcttaacttcaagaatactaacccattctttataagaatcaaatacatattgtggagaagtataaaacattggaactacaaatagaacgaatgcccaaaatagaattccccacagaaaatataattttcttttagagaaaaggaaaaaagctaaccccacaatcccataaattttggttaatgtgcctaacacaatcatcaatgcagcccaaaaatctttttttctctcgacaagaataaaagtaaaaagaatgaaagcggctactgctgcattatactgctgagtcacaacagataaatataagccattatatgacaaccaaataataatggctgttttccatttttcaaactctaacttctttatagcaaagtacaataaaagagcattacacaaactccacaaagcagaacccaccattgttggcatgattgaaaaaggagcaatcaataaagtaaaaggaatgccatatagaaataaatcaaaatattctttaggatattctacatataaaggcgtttgctccaaagcatgaaaaaatgaacgggaaaatatcaagtagttatttgcaagtccttctgtccagcttacccaaaatcccctgatagccaccccaaaccacaaaattgctaatacaataggattttgcactaaccttagtataaatcttattatatttttcatcttattatatccttgtttagttttatataatctataaaacgaccaaaactaacattctttttcctaaaatatcgaatgaaagcatccagccttttttccattccttctcctgcatgattccttataataaatggcagtttccattccggatgttcatttaacggataaaattcccacggatgaaagtatgtcacaaaatatccatcatgccgatgagtgtatttacacaaccaacgataaagtgaagcgggcaaattatgacatgaaagccaaaataaagggaaacgcagcaaaggagtaactgatgccggcatttgaatcacacggtcttttataaaaggagtacggggagtagaaagccgcatatatcttcccgggataaatgtcggattcaaggaagaattatatatataccccgcctcatatacagctttttccgacacaggcatcatgcgtgcctgccgatagccataaactttggctccggtgatttcctccaactgatccttcgaccttttcagatcttctacttcaaaggtccaatgatagaagccatgagaagcaatctcgtgacctccctcctgaatgcgctttattatatcaggagcatgaagagcaaaatttgccgtacagaaaaaggtcgcttttacctgattccgttccaagcaatccaaaattcgggtagtcccctctacagaaactttaatttgctcttccattgatatgtccacctgatgttctttgggcacatcaaattcctcaatgtcaaaacttaataaaatcattccaatattagtctagtttacgtttgttgctgtgagttgctgcaaatatgcagccacagcctataatgcttgcatatcgtttagtcttttataataaccatctaattccaataattcttcatgacgcccacgctctacgatttccccttcatagagcacacaaatctcatccgcatttttgatagtagaaagacggtgagcaattgcaatcgtggtacgcgtcttcatcaatctctccaatgcttcctgtaccaaacgttccgattcagtatccagtgcagaagtagcctcatccagaatcaggatgggaggattcttcagaatagcacgggcgatgctgacacgctgtctctgtccaccggaaagtttgccgccacggtcaccgatatttgtattatatccttccggcttttccataataaaatcatgggcattggcaatcttagcggcctctatgacttgttccatagttgcattttctacgccaaaagcaatattattgaaaaatgtatcattaaaaagaatggcttcttgatttacattgccaatcaaactgcgcaaatcggcaatacgtacatctttaatacttgtaccatcgatggtgatatctcctccttgcacatcatgataacgtggcaataaatctacgagcgttgattttcctgagcctgactgtcctaccaaagcaactgtctttccctttggcactgttaagttcacatgtttcaacacttctcttttaccatcatagctaaagcttatatctttaaactcaatccgatcattcattccagtcaatggtttcggattaggaatttctttaatattattttcagccttcaatattttgtccacgcgttccatagaagcaagccccttagggatattataaccagccttggcaaagtctttcaacggatttatcacgctataaagaataaccatataaaatataaacgtcggtgcagtcaatgacgaattatgccctaaaatcaaagcaccaccaaaccataatacagatacaatcagaattgttcccaagaactcactcatcggatgagccaaagcttgtcgcatagccactttgttgactgcatcacgaagctcattactgcacctcgtaaaacgatttatcattctgtcctctgcaataaacgctttgataatacgcaaaccacccaatgtttcttccaactgagacattgtatcactccacttaccttgtgcctccagtgattgacgctttagttttcttccgaccttacccatcagccagcccatagccggcaataccaaaacggtgaaaagagttaacttccagctggtagcaatcaatgttataaaatacaatataatcatgatagggctctttatcaacatgtccaatgaactggtaatagagttttccacctctcccacatcaccactcatacgagctataatatctccttttctctcctctgagaaaaagcccatcggcaaacgcattaccttcgcatataccatgatacggatatccctgacaactcctgtacgcaatggaatcatcacagctgaagatgcaaaataacaggacgttttaaataaagtcatcaaagccagaaacagtcccagaaaaatcaaagcagtagtaggaccattatcctgaatcatttgggaaacataataatagaaattatttatcgcaacatctttaaaaccggcagttccccattccatatactcatataccttattattctctcctgttttaaacaaaatatccagaatcggaattaacaaagtaaatgaaaacacattgaatacagctgacaagatattcagcaaaatagcccatccgatatacttcttatatggcgacacaaaacgtcgcatcagttgcaaaaattccttcattatttgaaataaaataagttaaggctgcaaagatacaataaaactgtctaacagttgaaggtttctttcaataattaatacgaattatataatagccaccttcttgaccatttattcgtctatttcactccaacactactcattatcaaaagatatgggcaccacatgataataaaccccatgagatctccggtacgatttcactcccaacttttgcagaatacgccccaaataagatacttgccgaggtgaaaacttcatcttactagccttctgtattcgttgtagcaaatccgcagcaagcaaccattctcctgcctcttcgtcggccgccgcccgataatatacctgaaacaattgctcgatcgcaggagactgctcaaactcctgattagactccgtcataatagcttcctcttcttcatcaaaccaataccgttcatttttataaagcgccgtcattgcttgtgcataaagctgctcataatcaatgggacgcaccacatcaatcactcccgtcacttcgacgccgataaaacggcgactaccggaagtgtctgtcagtaagtctttatgattactcgtcccgataaaagaagcataccggcggagtgattccacagctgacgcattcgggcgacgggtattaacaaccggtttttgcaaaatatgtttaaggaatgactgctgattgacacctatctgatcaaactcatccatattgataagaagaaaacgattcagatacaactcggcgtcccttttacggctaaagtcaatgctgtccgtataatacgcctgcaaacacggaggcagaatcagacggcaaaaggtagacttacgataagcctgcggaccgattagaataggtgaagtactgttcgcatgatttttgtcaactccacgccagtgcgccactgtactgagaaaccaacgacgaaagagttgtccccaatgaggattatcacaaggaactctttcagccaggtcacggatgtggtctttaccgtcccaatggggaagatcataaagaaattcctcgacagggtgataaacgggaacatgatcggaattcagatatcggaccacatccttatcccaaagtttgatgccctcatacatcgcattcatcgtaatacttgccatcacccgtttgtctatggggcgaaaataaaagttgaagctgttccgctcacggtattccacgctcgaagtcagcatattgaaacgaaactcatagcggcgtttcataaactcatctgtctgcatgacaaacaattgctccggcagcaaactacttttatcggcaaatccctcacacgtaccatacacgttcttcaccgtctcgcgaatcaggaattcatctttcggtaaacgataatgagcacgtgcccatcgcacggtgtcttcctgtggaataccggcacgaaaacactgctcagccagacaaacaagcaatgagtgtatatcatcgcctgggcggtatcctttttgctcggccaatgcccgggcaaatgctgcttcaaaaagaacagaaagtgcttcgtaactatcatatccgggaacaagccgctgtaaaggagaagcctgcgcctgtacctgctctcgataggtggtttcccccggcaaagatgctggctgtttcagataaacaggcatggcttcgggattaaaatacagctctgggtcgaaagtcagccggcaatactgttccagcgaaggctctcttaattcgatatcaaacgggagttggggctggtaatatttcacagccagacgataagcatgcgcatgaaagacttccgcctgttcgcgattatcaggcagacgattgtcgggatacgtaaaacgaacccatatctttacagactttcctgaagaaccgataaaagcaagatacgtctgaggcagttccttcacacactccttcacctcatcagcttccatacgtccggacaacccgttgacctgaagcataacgattccattatattcggccatcgccatcaccccgttttttctgataaaagctgccgccggaagtatcttcgggaccctctctatataatcatttttatcaccgggaagtatataaggcaggacttctctcatattagagaccagttgtgctttagtttcctttttcatctgctctacgagctgttcaatcttcaacgtacgcatcgtatttactttgccatcgtctctcacttgtgttattctcattttttctttcgctgtttgtcctgcttgcgtgtgtagggcaatatatattttgcacaaaagtactgtaaacattctatgtaaacaagtttctgatcataagtttcattcccatctcctctccttctactagaaaagaaaaaatagattttagtctcacggtctcactacttttacataatcaccaaataattaatatattataggatgagagatactttttacagaggtatctctcatcatttccccactgaaattactctcttctaacctgtctctcaccttttttgattatctctcattctgctttccaacttccattatttaatttcagacctatacatttctccttttagaagtactttaaggcgcatatattttaccattcattatcatgcaaacaatcctataattgcttgttttacaactattattgtcgtatctttgaaagacgttattcatcatactacccgggtgaaccgacctgttcacccaggtacacagatacgttctcgaaggtgcaatgatcggttcacccgggtagaacgatgaagatgtcagtaagatgacacgcagataaaggctttaaatgccgaagagataagtaacaccatatataaacaacagataaacaacaattaagatggcagtacaattcgaattttataagaatcccgttcagggagaagaagagggggaaacaagttatcatcccagagtcgtgaattttcaacacgtgactacccaaagactggcagtcgaaattcactcggcaactacctttggcaaggccgaagtggaagcaatgttaatggaactcagtcggtgcatgggcaaccacttacgcgaagggcaaagagtacatcttgacggggtcggctattttcagatcacattacaagcaacagagccgatacattccatggccgcacacgctgacaaagtgaagtttaaatcggtcagtttcttggcggacagagatttaaaaggtgagcttataggtatgcatgcacaacgctcaaagtataaaccccactcggctaccctctcccaggaagaaatagacaaaaaattaaccgggtacttcgctacgcatacggttttgacccgctctgatatgcagtcactttgccaattcacacacagtatggcggcgcgccatattcgcaggttgaaagaagaaggttctttgcagaatatcggaattcgtacgcaaccgatttatgtgccgtgtccaggacattatgggaaatagttgtaaaatagaatgagagatagggtaaaatagggtaattccagtgagaaaagaatgagagatacctctgtaaaaagtatctctcattctataatatcctagttattaggtgattatgcaaaagtagtgagaccgtgagactaaaaaaattcttttatagcagacttagatataatcacaacacccaaagaggaagcacaaatgagcttcctcttttacctaatatcgcttatggaatatcttgaataattccttcccaactatcaatccctattcgagataaatactgttcaaaataatcatcttcttcatctgtatccgctttttgataggttgtccatacaggcttggcttcaccattatgaggtgcatcggcatacttacgcaatcccaaacaagcaccatctcccaaatggtcaaaccaactatgccattgtatgccattaataccgtccaaattgttaatcttcttccaaccataagcaaatccggcagcctgatcctgcaaatcatcatcttcataagatggcgaacatgtgcccgcttcagaaagccatacagaacgtctgatagttcctttatattgatttcgggatgttttcacccacttatccaacacttccaaatttttcaaggtcacatattccgtatccatagaataagttgcctgttcatcatcccaagtacacgggttacctaactgagccgggtaactatgacacgccaatgaccagaagaaatcaccttcgctttcactgaactgattcataaagtcgagcatatctcttactttataccaaccgccaccggcagcgatattccatccatgcgagaaagagataaagacttctgagtgctggtcatattgatgcgcaatattatagcacatacgcatcgaacggagataagtatccataaacgtggcaatcggtttgtcacccatattggtccaatgacttcctccatccacttcgttatgtataatccagtgcgctatgcgcatattagggtcactatatctttctgccaggaagtcaagtgctgcagcgtaacaatttgtagactctattgtggtcatattgggcattgtataaggagctataccattaaaatccggatgtttcaaaagagtaccggcatctccggtaggaggaaccagcaaaatacctgctacagagattccacgtttactcgtttgctccaacacagcatcaaatgaactcttcatatatccctcattaaaataatatgtcctgccaccgtaagtatgcggaatatctccttcctgttgagaaagatgcatgaaatgagaaataggaatgttgatggtggcactggcaatacccaaatcatccaaatcagatgcaaggaatccatggtttatcaatcctcccaaccccttcttagattttaaaggaatagcctcaacactttgttttacgtgtattttatccacgttcgcatagcgggcatgagaaacaatctcatccttggaagctccttctttgtatatagcccacttagacaataaacgatcatacttatagtcacctatagtaacatatctatccaactgaacgttaaaagagccgtttgataaaggtgttttattttccaccttttccactttgaacatatccacaaatggtggaatctctcccaagaagaaagtaccttctcccgtatagttaccttgaatactgatcgtactctctcctaccaccacatcagttacatggcaatcatattctttattcagataatctttaattccttgttcgtacttctctttattaagtgcttcattattctcgtcctcttccgcctgtttttcctcatcattcatcatacgtaggcgtatattacgcatttgtatgatattattaggctggtctccaaaatccagacgcagaaaatctttcacttttccccaatcaaactcctgtctatatttctttagacgaacgctgaatgaagcccattccgtagaagcaggaacggttcccgcactcatgctatgagtagcatcaatcccattttttgcatcagcaaaaaagagttcaaggttactcatccccatttccgtctgatattcaaattcaagaacattacattcttcgggaacatcttctttaaacaaaccggcagtcgcccaaggatcaccattagtagtttctatcgtataactactgtcttcattctgagttaaggttactcccgacttatacggtccatccaataacatataaacaggtgggataacaatttcttcaggaggaataacttctcctccatcgtcttcaataaagtcatcattacaggaagacaagttcatcacaaaaaatgccattaaaaacaacatgccacatcgccctaacaggcgttcaggccttctcgtaaagaaagctttcaaattttccataatttcagttttagttaataatgtcgttgattaaaaattctcaataatattccaatcaggaattccaattaaaggtaagaattgttcgaagtattcatcttcttcatttgtgcctgcttttcgataaacttcccacacaggtttggcttctcctctgtaagattcatccaagtatttacgcaatccgaagcaagctccgtctcccggatgatcaaaccaattatgccattgtagcccatcaatcccttccaatgcgttgattttcttccaggcgaaagccaaactagccgcttgcttctgaaaatcttcatccgaataagtaggagaatttactccagcctcagaaatccagacagagcgcttaatagtccctttatatttattttcttttgtaagcgcccacttactcagaacttccagatttttaaacgtaataaattgggtatccatggaaaacgttgcgttcggatcaatccaaacacatggattcgtcaaatcctgagaatagctatgataagctaatccccactgaaagtctccttctacccgactataaacattcaacaaatcaatgatttctttgcttgtatagagccaccatcctacattcgctatctgtgtccaggaatgtgtaaaagaccccaaaacctctgcctgtttatcatattggcgtactatattataacatatacgcattgattttatataggtatccgtaaatacagtaagaggttttattcccatatttgtccagtctatacagccgtctacctcattatgcataatccaatgagctatgcgcccgtagcgattgtccgccgtacaatatcttttagccagaaaatcaaatgccgctgcataacaattcaccgattccagagtagtcatattaggcattgtataaacccctctttcataatccggatgttgcagcaatgcccccaggtcagggtctacgcatttagctgccggttcgacaagaatgatggcagcaacagcaatattccgtttggctgcttctaaaagaggaacgtcaagtacagtcttgaggtaaccttcatccatataataggttcttcccccataagtatgcgcaatatctcccgctcttggcgtcagatgcataaactgagtgatacaaacattaatcgtagcactacttatccccaacgaagtaaaatccgatatatattggttaggaataattccacccaaccctttctttgaagtcagtttgatagccggaagattctggaacgcatgaatttcatctgcttgatgcgcatgagaaaccagttggtctctttctactccctctttataaatagcccactttgacaaaagacggtcatataatgctccatccctttctacatagcgctctaactcaatttcaaaagatgaatcttccaattttaccttataaggagccttcttcacatctatgatatccaaataaggaggaatctcacctaaaaagaagttgctttcaccggtatattcaccagtaacgcgaacggaagattccattactgagacctgggaaattttacatgaatagcttttccccaaataagcattcagatcttgttcgtgttgaatatcttcttcatcaaaaggagattcaggtatctcctctttctcttcctcgtgacaggaagaaacaatgaaaggacagcaggacagaaacaaaagaataataaacgactcaatataagccttttttattaaaaaaaaatgacttttcaatagctccataagtaaaactgtaaaaggggtttaggtttaattgtacaaatataaagctattaatatgaacacatgcaaaaacctacttttttttacaatttttatacacagcgaaaaatattactaccgaaaagcatcttaacagacaatcatttattttcacaaatgaacactaatcaatcaacaaagctttcattggctttttgtctcccgtataatagacggaaatacaaaaagcctcccaatccgcataccctccgaatcgccagacataagaatcgacccaacagggaaactcttcgtatttgaaagaaacaacaccgtcttctgagtgtagataagtggtcactatatcctgaaattgcgcatgagaacgttttgcgcatggaatgacaaatgccatatgcaaaacgatcgcacttgctgccacaattgatacacttctacaccaaaccgcattaaatgaagtctgttcactgatcagcttgattaaaatcacaacagaaaacagctctattccaaacaattgccggacatttcgaaatcctataaccaagctaaaaacaagttcaattaagattatataaaaataaagttgattatcatagaaaaactttctcaaggtatgattattgttgtttctcttttcacgaaaaaaagtatataccagcaaaaacagaagaacataaaatgcccgaagctcaccgattatcaataagaaggtttcccagatggaaggatgatcaaacgacgcgcgcccgcgggcagcaggcgataaacacaacaacaaggtcccaagccaaaagccagcaaccaaagctatttcaggtgatttaggcttcctcttattatattgtacacaataaataataaacaaagccccggaaatgccaataaccaaagattcatgtgtccaaccagaaatgacgcccagcaaaaaaagaagaaaagcaactccccaattcaccttttccatttgccgcactttagtataaacaagcagaaaagccaagcaaagaacggcgctccaagtataattgagggcaccactcatcagcaaaaaaagatcaaccgggcaaggcagtaagaaccatataaagaaaactgcagcaacccagtaaccgaattttgtcagatttctttttccggaaatccatataaccaacatattaagtaacagaaaagcgaatacattgattaaattaaaacaattctccccccaaagtccggcaaacgactgctccagaatatgaggaatggtacggccattcacataaaaatagtgattatattgcgaaaaaataacatcggtaaatgatgatatcttctgctcaaatcctatcgatgcgccttcaaagaaagacttagctgccacaggagtcaaatagaatgaataaagataatcatctccacatatcggagtgtacatattcatcaggtaaaataaacttcctattatcaacagaaatgcgccaataccgatccgaaccgtttttttactcataatcttagttattgtttcacaccattatattctcttgcaatgtaggtaggacgattctttgtttcattgaaaatacgtcctatatattcccctatgactcccaaggacagcaactgtatcccacctaaaaaaagaatcacgaccatcagagtagggaaaccttgtactacttcgccccatatcaatgttttaaacatgatgaagcacatatatatgaaagcaaccagggaaactataattccagcaaaagtagaaatgcgtaaaggagctacagtaaaggaagtcaccccttccacagccagacccagaaggctgaaaaagttaaacgaagatgtaccggcaacacgatcttcctgctcgaacttgatctctttcttacgaaatccaatccaacaatacatacctttagtatatctttggctctcacgcagctgttttaaagcgtttatacaacaacgatctaacagtctgaaatcaccgacattcgggagaatctccacacgggtcgttttctgcaataacttatagaataacaaggacagatatttacgcatcaaactctccttgcctctggttattcgctttgcgtatacatcatcatacccttcttcccaatatttcaacatttcagggattaagtgaggaggatgttgcaagtcagcatccataatcaccagacaatcgcccgtagcataatcgaaaccagctaacattgctacttcttttccaaaattgcgcgacaggtcgacaaaattaattctctcatcttgtgatctcaaaaatttaataacttccaatgttttatcatggctgccatcattaacaaacaaaatctcccactcatattctgcataagaatccatcatttcttttagcttcgaatagagctccggaagagagagttcctcgttgtatgcaggtattaaaacactaactttactcatatttttttagattttagaacaaaacgaacaagaaggaaattaaccggtactactaatgcaaacacaggaagaggtgcccatctctccgggactccgatccatataaataatgacaatagcccgatatgcaacaaataattgacaaaatggctgattccaaatcctattccttttctaacagtaggcttagtgttaaaagtgaacacattagacaagtaaaaattcagaataaagctaatagcataaccaatagtatatgcaatagctggtaacatcaatacacataaaaagaaataaataccataatgagtagcagttgccagaacaccaaccaatatgaaacgaacaaactctctacgcttattaaaaacagacatcatccaatactcttttattgattttgatccaactacctacaggagatttataaaacggtacaatattataaataatatgtaagaccagcaaagaaaagtataactaaatatacaaaaataaataatgttacttctccattagattaaatcatagaatgatatctaaggtgcaatatctccactcatcttcatgagttaccaccacacatcactttatacattcaagaaaaaagctcccttattttgatcacaacatccatattctgcgaatcaaattttcgagcaaacaaatgctctgtttctaataaatattgcaaatcctccattttccaaacataaggattcccccgttcccaatcaattgcacgaagtccggcattcaactgctcactaccaggataaatatgactccgcctttctgagttccacaatatagattgaaggaatatttcgtcaccacagcaaacatttttaaaacgccttaaaataaaagacttttgggctaatataattgttagcaactcatgcgtaatactaacccaattggaaccctttttaaattcaatttctttaggtcggttataatggaagaaatcctgcaactttaaaaaatttattcgaagagattgtacttgctttttaaaaatacgaggtggaattttataataacgacagaacaaatgatatttaaaaacctttctttcaagatcttttaaattagcctcaccacaagagtaaggcacaaactcataccccttatttttctcgaagaaacgatgaatatagtcctgtgactttatcggtaaatctacccctgacaacaaatgataataatcataagggcctttcatactggctgtctcaagtaacaacagttcagcctttaccacactaatatcaccccatctaacatcaagacgttgctcaagtacaaaaagacgagcttttgcaagccgaaataaatcttgctctaaaggtccgagcacgactttcttatcaatatgcagatatatatcattcctcccatcatcaagcatagaaagtagtatcttcaatatttgaaattcattatgggccagaattaaaaaagcatgtctcattacctttgcatcattaaataagttcattatcatgcaaagatacaacagatagaattccaatacaacaatagttagataaattccaaacatatattttgataagtattggaatctatctatctttgtgaaatttaagtcttaaatcattaaattggagttgacacccggttcttaatggagacaaagacaataacgtcattaacctaaacaactattatatagaccaataatatccataattacaatgatagacaaacctatatatgtgacttcccccctactgccttctttggaagattttactttcttattaaaagaaatatgggaaagcaaaatgctgacaaataatggcaacttccaccaaaagctagaagaggaattagctaagtatcttaaagttccctatctcagtttgtttacgaacggcactctacctttaataaccgctttacaagcaatgagaattaccggtgaagtgataactactccctttagctttgtagcaacaacacattctctttggtggaatggaatcaaacctgtttttgtagacattgagccagaaacctgtaatctggatcctagtaaaatagaagcagccattacccccaagactacagctatcatgcctgtacacgtttacgggaagccttgtaaaacgaaagagattcaagaaattgccaataaatatggattaaaagtcatatatgatgccgctcatgcttttggagtagaaataaacggggaaagcattttaaactttggagatatggctactctgagttttcatgcaacgaaagtttacaatactttggaaggtggagcattagtcgttcatgacgagcagacaaaaaagcgcatcgactatctaaaaaactttggttttgccagtgaaactgaagttgtagcccccggtattaatagtaaagtagatgaggtacgcgctgcatacggattacttaaccttaagcaagtagatcatgcaatcaattcccgtcgcaaagtagccataagatatagagatgaacttcaaggtgttaaagggataacctttttcaatgatataccaggagtacgccacaattattcttatttcccaattttcataaatgctgaagaatatggaatgacgcgtgatgaactttattttaagatgaaggaacataatgtattcggacgccgttatttctatccgctaatcagtacattctcaacatatcgcggattagattctgctaaccctgacaatctgccaatagcaacccaaatgtccaataacgtcatctgcttgccaatgcaccatgctttaagtgaaaatgaagtcgagtatatcctccaaattataaagaaatagtatgatacaattatcagaaataacaaactctatatccccttccttaacaaggcgtctatttaacttggcccaaaaatatgacaatgttatagatttcacattgggagatccggatatacatccacacgataaaataaaagaagctggctgtaaagcgatactggaaggtcgtacaagatactcccctaatgccggattattagaattaagagaaataatatcttccagatacaagttacaatataatatagaatacaacccggcaaatgagattatggttacagttgggggaatggaaggattatatttaaccctgctagccattctaaacagaggggatgaagtcattataccagctccatattggataaactatgtacagatggtatgtatgtgtagtggagagcccattatcacagctcctgtcagcaccaatgacttatcgatatctatagaaaacataaggaaggcaatcactcctaaaacaaaagctattattttaaacacgcccagcaacccttccgggcggataatttctgatgactccatccaacaaatagcacagatagctattgagaatgatttgatagtaataacagatgaggtatacaaaaccctactttatgataatgctcatttcaaaagtattgttacatgcgacaagatgaaggaacgcactgttgttatcaatagtttatcaaaagaattctgtatgaccggatggcgtttgggttatgtagctgcaccttcagaattaatatcagtcatgacaatgtttcaagagaacatagctgcttgtgctccattgccgtctcagtatgcagcaatagaagcactaagaaattcggagaaatattcggctggtatgattgaggaattcactctccgccgagatgttttattggaagaagttgccaaaatcaaaacaataacagtcgatgcgccacaaggaaccttttatgcaatgttaaatataaaatctaccggattaaaatctgaggagttcgcatatgcccttttagagaaagaacaggtagcagtggttcctggaataacttacggtgattgttgcgaggattttatccggattgcttttacattagatatttataaaattaaagaaggaattcaaagacttaagcgatttgtcgaaagtttataagatgaaaaaagttttaatgttaggaggctctttatatcaggtctatgcgattaaagaagctgtaaaaatgggatattatgtaatcacctgcgattacttgccgaataacccaggacatcagtatgcccacgaatattataatgtcagcacaacagataaggaggctgtttacgagttagccaaaagacttcaagtagatggcgtcgttgcatatgcttcagatcctgcagcccctacagctgcttatgtttgtgagaaactaggattgcctaccagcccctatacttctgtagaaattctttctcagaaagacttattcagacgatacttggctgaacataatttcaatgttcccaaatacgtcggatgttcttcatacccggaggctttggaacaaatcaagaatttaacccttcctgttatgataaagcctgtcgattcatcaggaagtaaaggcatcaataaactgactaacgtagatcaactaaaagactttatagaagatgccctctcatattcccgtgaaaaacgcattattattgaggaattcatagagaaggacggatatcagatatcaggagatgccttttccgtagacggaattttaaaattccactgttttggaaacgaatactacagttcttcagttgtcaaagatttcgccccacttggtgaatgctggcctttccaaatgaaacctgaaattataacagagctagaaaaggacatacagcgtctgatttctgaactaaaaatggggacaaccgcatataatgtcgaggctattcttggcaaaaacgggaaattgtatatactggagttaggtgccagaagcggtggcagtttaatacctcagattacggaactggcaacaggagtcaacatggttaaatatgtgataaaagcagctttgggagaagattgttccgaaatagagatgtcacctgcaaggggatattggtctaattatatgttacatagcaagcagaccggacggtttaaagaaatatcatttgatgaaaactttgcaaaaaacaatctggtagattgtgtaacagaactgaaaagtggagataatgttcatgctttccgtgatgctggcgatgcattggggacacttatcctcaaatattcttcgaaagaagaaatgtttaatgttatagaaaacatggaccagtttgtacatattattattgattaaaatatgagcataacaatccatacagaacctctagcatataccgaattcagagattttatcatatcctctgcaaactggtttgttccttctctgttacagatgcccaacctggatgaatggatattgaaaatgtaccataacggctctatgtactatactatttccggatctaacattatatccttaattgttggctattacaatagagaagagagatttttatatataccctatgtctgtgtaaaccccgaccatcaaggtcatgggatctctcaaaaaacaattaattatatcatagaacatctttctaccgatattcagaagatattgctcgaagttagaaaagacaataacaatgcacttcaagcatatcataaaatgggattttatgaggctgaggatagggatgagaagtatttaatgaagaaagagatacataaaagttgatattgaatgaaagatatagcaaatactccattagtaagtataatttgtagcacatataatcatggattatatatatcccagtgtctagacggttttctaatgcaaaagacaaattttccatttgaaattctaatccatgatgatgcatccactgataatactcctgatatcattcgcgagtacgagcataatcaccctcaagtcataagacccatatatcagaaagaaaacaaatactcaaagaaagaagatatctttgccaaataccaatgctcacgagtcagaggaaagtatattgcaatatgcgaaggagacgattattggattgccccattaaaacttcagaaacaaatcgattttctagaaaacaatcctgattacggcatgatatatactaccagcaaggtatataaccaaaaggaaggcaaaatagaagaagatattattggacgggaatttaatggttatatagagttattatccggaaattgtattccaacccttacatcttgcatacgcagtgccttagtaatggagtacttgaaagaggtggaacccaagagcaaaaactggctaatgggagactatcctatgtggctatggatatcatattatcacaaaataaaatttcttccggaaagcactaccgtataccgtgtcttagaagagtcagcaagtcattctaatgatatacaaaaatatgaaagattcatattatcgaccattgatataactgcattttatatccacaaatttaatactccattaacagagccatacttacgatccctaagttgcttttattatgatttatacgataagtatatgcatctgggcatgtataaaaaggccagacactattcaaaactcattaatcctagttatgtctccgcacgtatgcgaagaagagtccgccgattccatctcagattcatgcaattaagattagaaaaatggctcaatataaaaggaaacaaaaggaagtaaaaaggagaaaaatatttagtgggatatt

SEQ ID NO: 4570 - DNA, 2177 bp, Unknown
  gut microbiota DNA sequence
atcgtttctactgtagaattgatgggaatataggtgcgtatctgtggaatacataccagaaaaccgatgactggtaataaggcatagcggtagctgatgattacccagaagagggtgaaacagatgttgacagcaaggaagatggggaaggcaagccccaggcaagaagctatcgggtgtattttcggttgaagatacgggctataggcactcaaaatcaacatccctacaaagagtgcgttgactgccaatatcaaataaaggacaaatttgccaatgtgttccattctttatcttttgcttgcgtcgaacaagctctttttctcttccgtcgtcaggctttcataaccggattttttcagcttctccagaatgcggtccacttcatccgattgtgctttcttacgggcgttataatcgtaatctttctcgcgacttgtatcgcttccataatgtactttcatttttggtttgcgtttccatgtctttttctgaaacagggaagcgaagccgtcaaggaaccagttgatccagtaagtcacgtctttgcctttgctcagactggctgcaaaccagagcccggcaagtgcgccgcctaagtgggcgatgtgtcctccggcattgttggatgtaataaagagcaggtccgttccgataacgatcagtgcgagatatttcaaacggacggcgccgaaaaggaaaagctgtacccgatagttcggttctctgtaggcggtggcagctacgatggccagcacggaagcggaagccccgacgagtgtggagaacggcaatgtctggctgaaataagggaagatgttataggctatcatgtagaacaatcctccgcagatacctcccaatacatacaatccccgtaaatgctttcccgaaaagaaatagagaaacaaacttccgaaccagtacagccagagcatgttgaacaggatatgcaggaagcctgcatgcatgaacatatagctgagcaatgaccatggctgaagaataaaccggtgaagggaagccggaagggcgaataaatcgaatattcccgttgcactcaggttgaacagctgcaatatgacactgattaacgtaccgataacaaagatgcctacgttaatgtaaatcagtcggatgaaagtgtttcctcttctgaacgtttcttttaaatcagttataatatgtcccattgtttctacttttttttctccaatacataatcaggataaatccgaatatcatacctcccaagtgggcgaaatgcgcgacattatctccgggattattggcaaaaccggcatacagttcaatcaaagcataaccgaaaacaaagaatttagctttgatagggaagggcaacggaaagataaatagctggttgttggggaacaacataccgaatgcgagcaaaatggcatatacagctcccgaagcgcccacggtggtcagcatgttcaaaaactctcccataggaataatccccgttcctatatccacttgtgaatagtggctgtagtctactatatatttgatgtattgcactccttcctggatgagtcctgcaccgataccacaggcgatataataaaaaaggaaacgtttcggtccccaggtccgttcaagaacagttccaaacatgaaaacggcaaacatattgaaaaaaatgtggctgaatccgccatgcatgaacatataagtgataagctgtgccggattgaagtcactggcgaggaaaaaatgcaatcccagataattagtcagatcgataccgtatcgttgagcgacaagtgtcccgaaaaagactagtacattgataattatcaggtttttagttacagttggcataattttatattctgaatatttaagtaatgaacgcaaaagtacgaataaattctgttttaaagcatggaaaagcttccctattagctctttttcaataatttgctgcgttttttttatgtttttatttgatatgttgttttgttcatctatatttgtaaagtcgtaatgggaaatcttttgtgtaacatatatattaattaatcattttacgtatcatgaataagtctgaacttattagtgcaatggctgctgaagctcaaatgagtaaagccgatgcgaagaaagctcttgatgctttcatttcttcagttactaacgctatgaaagct

SEQ ID NO: 4571 - DNA, 2916 bp, Unknown
  gut microbiota DNA sequence
tacacaagcaaatttatataatgattaacctctttattaatatccaatcgtaaatctctcctgatgatgcttgggatgttccaattcatcgatcattgcagccgcatagtcttctacagaaatatggctgttacccacgatatccacaatcatatcgtctttgcccaaacggtaacgtccggtacgtactcccggtctcatatctgctgccggagagaaaaatacccagtcaatctctttctccttcatcaggaaattcaaataaaactctcccaaggctttaactccaggcaggatattctcaggaacttcacccgaatccatcagtcgtaatcccggcgcaataaatagtgagccggcaccacctaccatcaggaagcgattcactcccgctttcttcactccatcaatgatagtcagatatactttgatggtttcgtcatatatattaggattattccatcccggattgaatgcactgataacggcatccgctcctttgcaaacttcgcatacttcatcgagcgaagagacatccgctttctttactttcagatgttcgttctctatctttattttttcgggatgacgaactacagctgtcacttcaaagccacgattcaatgcctcatttagcagagcggaaccaacaaagccgctagctccgatgaggaccatctttttcactttctccatattccaacaaaaattagattgttattattagtttaataacaatctaactttcagaatgttggtctccttttagaaaattaattatccgatatagatttcaatcgtttctttcagtttctccaaagaatatggtttggagaaaactgcattgcatccagcttgaatactatccatcacaggcatacgaatatccattaatatcaagtccggtttttcccgaataaagctattgattgcttcctgtccgttacgcacccacaggatgatatactctttcttcagtaagatattcagctgggcaaagttcgattcgatatcctccacaaccaaaatctttttatgacgtacggattcagaatcaatcttaataaaaagactctgttcggcaacttctaccggataccgcagaatcgtacccgcgccatcagcacatccgttataaagaaattctcgtcaaagatgaaaataaattcgggtaaagcttctattattttacagttatgttcttccagccaaatcacctcaccatgttctccgacacgacgaacctgtatctaatatgctttggactccgaagcaagcattttagcaaaagcagtctgataggcatttatatctccggggtatgcgaaatggtaaaagtcattaatgcctttaaatctttcaagcctaacgtgcggaagtaatcgtccgtaaagctacattttcctgtcggaatatcatattcccataaagctatttgatgtgcggcaagtacataaagtttcttttgtgaattttcccgtatgatttcattattctcattcggtgaatataagtttgtatccggctccatagactatcattatattttgtatgtgcattgtttgaacggcagcaaatataaacaaataaagcacaagttgtgtctaatcttattttttttacttagaaacaattatctttgcatcatccaaaaagaaatataatgaatcaagatactatctgcgctattgctaccgctcaaggaggtgccatcggaagcatccgtgtttccggtcctgaagctatttccattacaagccgcatcttccaaccagccaaagccggcaaattacttagtgaacaaaagccttatacgctgacattcgggcgtatttataatggagaagaaatcatagacgaagtccttgtgagtcttttccgggctcctcattcctatacgggagaggatagtacagaaatcacgtgtcatggttcttcctatattcttcagcaagtaatgcaattgttgattaagaacggttgccgtatggctcagccgggagaatatactcaacgcgcatttctcaacggaaagatggacttaagtcaggcggaggctgtagccgatttgattgcatcttcttccgcagccactcatcgtttggccatgagtcagatacggggaggttttagcaaagagttaacagatctacgcaacaagttgctgaacttcacttccatgattgaactggaacttgacttcagcgaagaagatgtagagttcgcagatcgttcggcattgcgaagactcgcagatgaaatagagcaggttatctcccgactggttcattcatttaatgttgggaatgccattaaaaatggtgttccggtggctatcatcggtgaaacgaatgcagggaaatcaactttactgaatgtattactgaacgaggataaagcaatcgtcagtgatattcatggtaccacacgtgatgtcattgaagatactattaatataggtggcatcactttccgattcattgatactgccggaatccgggaaacaaatgataccattgaaagtcttggtatcgaacgtacattccaaaagttggatcaagcggagattgtactttggatggttgattcatctgatgcatcttctcagataaagcaattatcagaaaagatcatccctcgttgtgaggagaaacaactaattgttgtattcaacaaagcggatttgattgaggaaaagcagaaagaagaattatctgctttattaaaggacttttctaaagaatacacgaaatctatcttcatatcggcaaaagaacgtaaacagaccgaagagttacaaaagatgcttattaatgcagcacatctacctacggtaacacagaatgatattattgtgacaaacgtaaggcattatgaagctttaagtaaagctttagatgctattcatcgagtgca

SEQ ID NO: 4572 - DNA, 12442 bp, Unknown
  gut microbiota DNA sequence
aattttattattttaggaatatcccttcttagtccgccaatttctttaactttttgaaatgctcgatcacagccagataattctgatccagacaggcatcaaatttattccagagatcccccagtacaacagcccctccaaatccgaaatcttttatttctagtagattatcttcattaatacctccaagtgccattacttttgagtcaatgatcttagctttctgtgcctcacgaagttcttctgccgtataagtagaatagtaattaaccttcgaaatactatcgtaaatgggactcatgaaaatgtaatcatagaaatgctttctgttcttcacctcttctacggaatggcaggaacaactgacgtgtccggcatagtcatgcggttcgctcggattgcgtgcattcaggtggatacccatcagattgaactcttctttcagataaaaatgttcgtgtgtcacaatgcggcgatgatatttttccggaatcagcgtcagtaatcgttcggaatacatggccggtgtctcaggttttctgagatgtagaatatccagtccctcctcgaaaagagcggtaatgatcttatcttcttcaacgaagaacgtgggcgtggtaactacaattagtttcatttcctgtgtaaagttgtaaagtttagcaaagttactaattaactatttcagaaaccaacgtttatagtgaaaatttgttagattgcaatgtgcgcaagtcaatagtccatagtttacctgataatacttcgccaaatccacagataatcttcagcacttccgttgcttcgatgcttcctgttaccgcaggagtaatgcccattacacctttggggggaggaggcattcgtctcatttcttcttcgtccggatataagtcccgataactttttttctcttctccgtaatggaaaacggatacctgaccttcaaagccgcagatggctccatagacatacactttccccatttccgcgcagatgtcgttgataagatagcgggtagagaagttgtcgcagccatctactactatatcatactgactgataatttcctgtgcgttttcctccgtcaaacgggttggataagtccggatagttatctcgctgtttagtgcggaaagtcgttcggcggcacatattgccttgggtttacctaattctttctccgaatagagcacttgccgttgcagattactgatactgactacatcgtcgtctaccaatccaatgcagcctactcctgctccggtcagatagagggctatgggagagcctagccctcccacgcctacaattagaacctttgcttgtttcagtttctgctgaccgtcttctccgatttcgggaaggatcatttgcctgtcatatcgcattgttttatcttttaaagtcaaaagactggtcccaatccttccaaaccggttcacgtcctaatttctttaggtcacgttccacttctaccgctttccgttcgtcactcacgtggaactgctccagcgtttgcgggtagctgtaatatccgcccggttctgtcttgctttcggcactcatggttgtcacgcccagtgttgccatgtgatttcgtatctcggcgctttcacgggtagaataggagatgtctacatcatgatcgaagattcgcatggcgaaagtaagctgtgcaagttcccggtcgttcatgataacgttaggttggaagccatcgttttcggatggacgcatacgggggaaattgacgctgtatttggtcttccagtagtgcttctgcaggtagcggaggtggtaagccatcattgtcacatccgtccgccattcctccagaccgatcaggacacccatgccgatcttatggacaccggcctgtcccatacggtcgaaaccatcgacacgccattcgaatttggacttcatgcctcgcgggtgatactttttatagttcgccttattataagtttcctgaaagcagatgactccgttcagcccgtgatgggtaagttctttgtattcttccgctttgaggggcatcacttcaatctgaaggttgctgaaataaggttttgccagatcgagagcacgggcgatgtaaggtacacctgctgctgccggattttcacccgtcacgagtaaaagattctcaaaaggagccagccgtttgattgctttgtattcgttgacgatttcctcctctgtcagaatcgttcttttcatcggattgctgatatggaaaccgcaatagacgcaggagttggtgcatgaattggtgatatagagcggcacaaacatagagattgttttgccgaaccgctccatcgtatatttctggctgagacgggccatcacttccagatagggagtggcggcaggtgagatcaatgccataaaatcattgacatccagatgctcttttttgcctaatgcacggcgcacatcggcatctgtcttggaatagatggcttttgtcgtctcttcccaggatattttttctaattcgtctgagaacattttaattaattgaaagttgaaaattaaaaagaaatgaggttgtgatttggttttggtataatcacaattcattatttatcactcttggcatttttcttcagatcacgggataatctcatggcgcagaaattaggtccgcacatcgtgcagtattctccgtcaatgtgatgtcccgcgcggaaatatccctgtgcccgttccggatcgagagacaagtcgaactgatctttccagcggaattcgtaacgggccttgctcaaggcattgtcgcgtacctgtgctcccggatgccctttggcaaggtcggcagcatgagcggcaatcttataagtgataacccccacacgtacgtcttctttgtccggcagggcaagatgctctttcggagtgacataacaaagcatcgccgtacctaaccagccgatttgagcagctccgatggcagaggtaatgtgatcgtagccaggagcgatatccgtcactaaagggccgagtgtataaaatggcgcatcatggcatttctcaatctgacgttccatgttctccttgattttatgcatcggtacgtgtcccggtccttcgataaatgcctgcacgttcttttcccatgcacgaagtaccagttctcccatcgtgtccagttctgcaaactgtgcttcgtcgttggcatcatggatagagcccggacgcagtccgtctcccaatgatacggcaacgtcgtattgagccagaatatcacagatatcgtcaaagtgttcatacaggaaactttcctgatcgtgcaccagacaccatttgctcatgatgcttcctccacggctgacaatgccgcacagacgtttatcggcaagatgaacattatgacggcggatacctgcatgaatcgtaaaataatctactccctgttcgcattgttcgatcagtgtgtcccgatagatttcccagttaaggtcttccactacgccattcactttctcaagtgcctgatagataggtacagtgcctaccggtacagggcagttgcggatgatccattcacgtgtctcatgaatattttctcctgttgaaaggtccatcagtgtatcacctccccatttgcagctccataaagccttttccacttcctcgtcaatgctggaagtggtggcagagtttccgatattcgtattgattttcacaaggaagttacggccgataatcatcggttcggcttccggatgattgatgttggcaggcagcactgcacgtccttctgctatttctttacggacaaattcgggagtaatgtgagtctcgattcccagttcctcacagttcatattttcgcggatcgccacatattccatttccggagtgatgattcctcgtttggcgtatgctatctgagtgatggcttctccctttttggcacgatagggaagggcaatgtgttcaaagcggagatgatccagacttttgtcatcacgtctcatttgtccgtattccgaagtgatttcggggagttgctctacgtcaccgcgtcccacaatccattcttcacgtaagcggggaagtcctttcttgagatcaatgctcattgacgggtcactgaacggaccgctggtgtcatatacgtatacttccggattcggagtagctatcttttcttcgccttcgaagctgacgctgggcacttgttcaactttccgcatggctacacggatgttcggatagagtttacccggcagatatactttctgagaacgggaaaattttattttttgttccatagaattttattatcgtattattaagaatagtgaaacaaacactactccctacttattacctattacttatcacctattacttattccaaaaatgcagttaaaggtgaacttgcttctgctataaagttatcagcctgcagacccagtcctgcttcgtatgcccgtcttccggcttcggtggcggctttgaaggccaacgccatttctaccggattgcctgctacggcgatagcggtatttaccagtacggcagaagcacccagttccattgcttcggcagcgtggctcggtgcaccgattccggcatctacgacaacggggataccggcctgttcgataataatctgcaggaattctttggtttgcagtcctttgttagttccgatgggagcacccagcggcattacggtagcggcaccggcttcttccagtcgtttgcagagcacagggtcggcctggcaataaggtaatacgataaagcccagtttgacaagctgttctgtagccttcagggtttcgatagagtcggggagcagatagcgcggatccggatggatttccagtttcagccagttggtaccaaaagcttcacgtgccatctgtgcggcgaaaacagcttcttccgcatcgcgtactcccgatgtgttgggtagcaactggatattcggatgaataatatgtttcagcatgtcgtcttctttgtcatccatgtcgatgcgcttcatggctacggttaccatttcagtgcccgatgccagaatggcttgttccattacttcattggaattgaattttcctgtacccagaaaaaggcgggagtcgaactcacggcctgcaattactaacttttccacttttcaataagtttatttgattatacgtttcatgttcaaaatctttcgtgtttccgctgccggatcctccgcccgaagaatcgttcctgaaagcgcgattccgttcactccggtttcgagtatggcgggtatatcctcacgggtgattcctccgatggctactaccggaagttcgatattcgcttccttcatctgagataaaatagcggtataaccttccagtcccagaacaggactcaggtttttctttgtagtggtaaaccggaaaggaccgatgccgaggtaatctgctccggcacggtagtgctgtacgacatcttcgaatgtatttgccgtacctccgataataaatgcttctccaagtaattgtcgtgcctgatctatcggcatgtcttttttgcccagatgcactccgtccacttccagctttttggcaagttcgacgtggtcatccagaagtaagatcgcttctttttctttgcagagcggctttagttggagggcaacagcttccacctcttcacacggagcttccttcatgcgtagctgaatccacttacatcctccttcaagtgccatgagtgccgattcgaaataagtataccgatcggtctggtgggtgataaattgtagactgaccatacttttaccctccacaagccgctttgatgaccacgaggttatcattctcctgtaacgcgaatttctcccattcggaacgtggaatcattttgttgtttacggcaatagcgatgccttgtaccggaagttccagttgggcagccagttgtgtaagggtagaagcaggagtcatttccacctctttgttgttaacttgtactttcattgtcctatcagtattaataagttgaaagtaaatacaaagagcgtgcttatatagaaaggcgataagaaagaaacacaatccctacgtcagtgctaactgcctcaggttcctagggtataatctcagcccctctttgggggcacccctttgtctttacgggagcaaagtaagcgaaaaagaaacaaagattcatcaaattatccgtttttttttcatttttcttccgattcccgctttttgataggatgagaaaagacaaaccgtgctccgttcttataattcttgtcaatccagatatcgcctcccatgcgttgtatggtcagtttgcagatcgccagtcccaagcctgttccctgcacaaattcgttgagcttctcaaaacgctggaataccagttcctgcttgtcttcggggatgcccgagcctgtatcggtcacagagaacagcatacactggtcttcttcgtctatttcataatccagcgtgatacttccgccgtcgggagtaaacttcagcgcattgttcagtaagttgatgatcacctgctgcaaacgtagcggatcagtatagagcatataaggctctttcggcatctgaagcctgacatctatatctcttgtccggtttttcctggtcagtgtgatcatgttctggcaatgatttaccagttcgcaccattcatacttgaacagcagtttgcctgattccaagcgtgatacatccagtacatcactgatcagttgcaataacaattcggaattagtctggatgatatccgcatattccttctgctcatccgttgcttccacggtatcgatcagcaggctggaaaagccgacaatagcgttcagcggtgtccgtatttcgtggctcatatttgatacgaaggcacttttcagttgattggcttcttcggcacgctctttggcgtgacgtagcgcaatttccgataattccagtttctttttatcttcccttaattgggctgtagtcttctcaaggtgattctttaagatttttgtccggtaataataatacagtgagataaacagtccgcctatcagtacaaggaaggtaaacaggatgaattgcacttccgtccgatatgcctgaaagaaaggcacctgttggttgatgataagtgaattgaaaggtagtttcttgtcttgaaatccccattcatacagtttgttggcatcaaatttgtatctgttgggcaacaaatgaatgtggccgacattgtttttccccttgtccagaaattgataagcctgttctcccatgcttctccctattccgtcgtactgggggatataccctccgattgcccaataaccgatggcagtagcagtcaggctgaaaacaggcaactctggattcgctttggagaaagcatatacagagttgttcatatacgttatgccccgattgtcaattctccagatacccagtagtgcaaccgaatttttggggatatcgcgtagttgtttgacggcagcatcaagggtgtggatacggccgtcaatataggtcgtcgatatttccggatagcgtttcatattctttttcacccacgcttgttcggcaagtccgttgtaggtgttgtccgagatgaacactaaatgttccatatccggataaaagcttcgcatcatttcgatatctttatcgacatcatattcgtatgtgttacaatatattatattgtattcgctcattctttccgttaagtcgatgctctgaggttcgtaggtctgtatatcaatagagtcttccggaatacggatgccgttgcgcgatgccatagcgcaaaatacgggcagttgtctgtacttctcgtcttcgaggtgcaggaaactgctccacgcttcgccacccagcaggatgaccagcttggcgttcggatgtttgtccagaatgttggtaagcgttctcttccattttctggattgattgaggtcggtaacattcatgttttctacgatggtggaatacttgccacccagttggcggtacgtttctacgaacgtgttgatattatcgtaggtatatttagtatcggaattgtaggacgtcacgaaaagtatctcctcttccaattcttccggggtagccgcgttactgatgaaagagagcaaaaggaagaaggcaacaaagaaaatgcgccattctttatttttttgttgaagtgtcataattgtctgttttgattttcggctattgcaaaaatacaatttatgcctttgaaatacaatagaaagcttaggttttttgttgtagaaaaaaggccgctgtgaaattcacaacgaccttttcaatagtatagtttagcttaattttaatgagtccggttacattcgtttttctaccacatcccagtcgatgatgttccacagggcgtttacgtggtcggcgcggcgattctggtagtccagatagtaggagtgttcccacacgtcaaaacccagaagtggtttcagtccggcgcgtacggggttactgccgtttccttctttggtgatatgcagtttaccgttcttgtctactgacagccaagcccatcctgaaccgaacaatccgactgctgctgcattgaactccttcttgaagttttcaaagctgccgaaatcacgtttgatggcttctcccagtttgcctgccggttcctttttcgaaggtttcggagcgaattggaggaaatataaattgtgattcaacacttggccggcgttgttgaagatagctccatctggagcggcggcaacgatttcttctaccgttttgccttcatattctgttccgggcacaaggctattcagattatttacatatgtttgcagatgttttccgtaatggaaatctatcgtttgctgactgattacaggttccagcgcattgtttgcgtaaggaagtttaggcatttcgtaagtcatggtcataattattaaagacattaatatagtattcatattgtcaaaactttaaatggttttgttatactataataacagccatagttcgtaaaaggttcacggtattttatttttatttataaatgtactgtatacgttccacttgctgtgggttgtcatagctggtgcggcatatccattgccccgtattgtcatactcgtaataggagtcaccgtcgatccggtttccgtactcgtcgtacaggcaggtcaggcagccggacgtcttttggctgttgccgaagatacgttggtagacgatgcgggtgaggtatccgtatttatcatattcatacagttctttttgtgagagaatctggttgggcgaattgacaaagagcatattctgatgctgagattcggtcattctgcctttgtcgtcatatttgttgactgtatatccctccatttccccgttcttgttgtactctttggtttccgtcagtaatccttgcttgttgtagctgctgacggtatatctgccgtccatgtattttagggaatcactttcgatgcttccgtcgataccgatgcggcgtgcacggcggtagaagtccgttttggttttcggattagtcttcacttcgaagatgcagtggccttgcgggtcgtacagcctgctggtttgcacctcgttgatgggttgcccgttcttttcagtcacggataatgtggtggtaagctgccccttgtcattgtaggtgtagctggtcgtaatattaccggtgctgtcggtctcgcagcactttatcaatcgtccttgagtgtaatattttacagtagtcggggtggaaacgatggcttgcaggataaatggagcacgcaaattctttgcctggtcacgaaattccttatacttgtgtgttttgaggaattcctgcaataaaccgagcgattcggagttgactattgccggtttcagaagctcgaagtctgccttttcactgagatattcaagatcgttcaggtgagtccgtgcaccggtggacagataaggtgtgttcttataatcatcgataatctgccggatggcggtggcatttccttcttttttcaggctgtcgatacgttggaacaggaaatcatcgtataaggtacggacctcggcaagataggggcgcggacctctgtcttgataatacttttgcatttcggggtcttcaaagaaggctttgaagtttgcaggagtcggggccgtcttcaccagttggtagagccgtacgttttcggaggcgttgacttgtgcaataaatttgccgttgggatactccttgacgtaagtctgatagatgatgggagtgggggttttgagcattccttccagcagtgccacctcgcggatgttctgcagccgttgcagcatggcggagtcaaccggatattcggtggcgtgaatgctgtccagcagtgcccggctgaaaggtattttatctttcgaggcctccagcaggttgataatggactggtccgccttgtcccgtatctgagaaagcggaatcttttccccttcgcagatgccggggaagttactttgggcggctttctcgtagcagccgaagtagagggtggctgcctgttcgctctgtccgttccacaggtcgttgaggacgtccatcaatgataaatcttcggcatagtacgcctttgtttcgtcatccagtttttccctgttcttctgccatttgtcggcgtcattgtcgttcagataccttagcagcttttccatgcggctttgcttttgcgccattacttgctgtggtatgcaggcgatgaggcacaaacataaaataaatgataaaaatatactctttttcattgctttgagtggttaggttaaatagttagtgatgaaaattcataaaaatatcttcattgtcaaatgaatgttatacttttgtcgtattgaaacaaatttgaacgccaagggtttgttaaaaatcctcattgtttttataatgctgttatgaataccaactatatagaggaattaaatgagagtcagtgtgcagcagtgacttataacgacgggccttcgctggtgatagccggtgcaggttcgggaaagacacgtgtgttgacttataaaattgcctatctgctggaaaacggctatcaaccgtggaacatcctcgcactgacctttaccaataaggcggcgcgtgagatgaaagaacgtatagcccgtcaggtgggcatggagcgggcacgttatttgtggatgggtaccttccattccgtcttttcccgcattctccgtgccgaagcaaagtatatcggattcacttcccaatttaccatttatgattcggcggatagtaaaagtctgatccgttccatcatcaaggagatgggactggacgaaaagacatataagccggggatggtgcaggcccgcatttcaagtgccaaaaaccatttggtttctcctacgggatatgctgccaacaaagaagcgtatgaaggagatatggcagccaaagtgcccgctgtccgtgaaatatatacccgttactgggaaagatgccgtcaggcgggagctatggatttcgatgatctgctggtgtatacgtatattctgttccgcgactttccggaagtgctggcccgttatagggagcagttccgttatgtgctggtggacgagtatcaggatacgaattatgcccagcatagtatcgtactccagctgacgaaagaaaatcagcgtgtttgtgtggtaggcgatgatgcgcagagcatctactctttccgtggagcggatattgataatatcctttatttcacgaaggtttatcctaatacgaaagtctttaaactggagcagaattatcgttctacgcaaaccattgtctgtgctgccaacagtctgatcgaaaagaatgaacgtcagattcggaaagaagtattctctgaaaaagaacgtggcgaaccgattggcgtgtttcaggcttacagtgatgtggaagaaggggatatcgtagccaataagatagctgaactgcgtcgggaacatagttacggctatgccgattttgccatattataccgtacgaatgcgcagagccgtgttttcgaggaggctcttcggaaacgaagtatgccctataaaatctatggcggactttcattctaccagcgtaaggagattaaggacgtcattgcttacttccgcttggtagtgaacccgaatgatgaagaagcattcaagcgaatcattaattatcctgcccgtggcatcggtgatacgacggttggaaaaatcatctccgctgccactgaaaatggtgtcagcctttgggcggcgctttgcgaaccattgagctacgggctgaacattaataaaggtacgcacaccaaactgcaaggtttccgtgaactgatagaaggctttatgaccgatcaggtggacaagagtgcgtatgagataggaacggatattatccgccggtccggcatcatcaatgatgtctgtcaggatac

SEQ ID NO: 4573 - DNA, 9190 bp, Unknown
  gut microbiota DNA sequence
aaagttataaagaatgtattagtacattaaaccttattcattctattttaatatggcaataatgaaaaatcaaaaatcaactctattattaattatctattgtttatcaacctgcatagtaacggcacaacaacatgtagaaacaattaaaaatactttcttaaatccaaaatcaaacaaagtgttagttgttgctcatcggggaaattggcgtagcgcaccggaaaattcaactgctgctattgacagcgccattgctatgaaagtagatattgtagaaattgacattcagaaaacaaaagatggacaattgattctaatgcatgataatacattagatcgtactaccactggaaaaggagaaattaaaaactggactctggcagatataaaaaagttaaaattgaaagataaggatggaaaagtaacaaattatgttgtgcccactttagaagaagctttgttaacagcaaaaggaaaaatcatggttaatttagacaaagcatatgacatctttgacgatgtatacgctatattggaaaaaaccgaaacccaaaatttagtaatcatgaaaggaggacagcctatagaaactgtcaaacgagaatttggttcttatttggataaagttttatatatgccagtaatagatttaggtaacaaagaagctgagaaaataatcacagactatttgaaagaattacgtcctgctgctttcgaaattatttattcagacccaaaaaatccgcttcctccaaaaataaaacaattactttttaagaaaagtttgatttggtataacacattatggggatcacttgcaggaaatcatgatgataatcttgcactgaccgatccggaaaaaagctacggttatctgatcgaacagctaggagctcgtattttacaaacagatcaacctgcttatttgctcgattatttaagaaaaaaaggttggcacaattaaattaataacatctttaattctcaataaaccacaattatatggataagaaaaaaatcagttatttaatactcctttgtttattctctttaagctgcacgttacaggcagagaaatatgaaacggtttctcctaacggaaaactgaagattaaactgaaaatagacaaaggtacccaatacgaagtatggtacgataatacacaacttatactcccttctcccatcggattacatctggcggacggaagagtaatcggcaacggaagtgtaaagtcggtaaagaaaagaaaggtgaaccagactatagacgtccttgttggtaaaaacaaagaattacaggatacatataatgaacttaccgtttctttcaacgacagttgcgaccttgtagtacgtgcttatgatgaaggagtggcctatcatttcgtcacccgtctcaacggagaaattacaatcatcagtgaagatgctattttcaactttgcttccaccccaaccatctattatccggaatgcgatgctaattattccagcgaaacggatcaatccggacgtacccatcaggtgcatcaaggatatagaaactttgaaagactctataaagtctacaaaggtccgttggaaattccttacgaacgttttgctgtttctccggtattatacgaatatcccgattctccttataaagtggtcataacggaatcaaatacctatgattatccggctctgtatatggaatccaacggctacaactccatgcgcggaaaatgggctaattacccaaaagaaacaatagactccgatccttccaatccttactactggtattccaatcatttggttgttaccagagagaattacatcgcaaagactgatggaaaccgtagttttccgtggcgtgtcatcatcgtttcggaagatgacaaatcattattgaacaacgaactggtatacaaactggccgatccttgccgtctgaccgatacttcctggatccaaccgggaaagagtgcatgggaatggtggcacaaagccgttttggaaggtgttgacttccccagtggaaacaagcagctttctctccagttatataaatactacgtagactgggcttcaaagaatcatatcgaatatatgaccttggatgccggatggtccgaagattacatcaaagaactatgctcatacgccaaagaaaaaaatgtgaagattatcgtctggacatgggctagttgcgccagagagaatccgagcgactggatcgctaaaatgcacagctacggtgtatccggagcaaagatcgactttttcgaacggaatgaccagatagccatgcgatggggaaaagaatttgcagaacgtctggccgaaaagcaaatggtagctattttccacggttgcccggtccctaccggattgcatcgcacgtatcccaatatactgaactatgaagcagtaagaggagcggaatgtaacttttgggaaaagacgttgactcccgaatatcacactcgttttcctttcatccgcctgttggcaggaccggcagattatactccgggatccatgagaagtgtcactcaggatgaattcagaccgatggatatagataatactccgcccatgagcatgggaacacgttcgcatgaattgtccatgtttgtcatttacgaccagtggatggcttatttatgtgactcacccactgaatacaataaatatccggatgtactcgacttcctttccaaagttcccgcagtttgggataagaccttgccattgcaagcaaaattaagcgaatacatcgtgacagccaaacaaaaaggcaatgactggtatgtgggcggaatgaccaactgggatgcccgttctacagaagtgaacctcagcttcctgaaagacaatgtctcctatcaggcaactatctttaaagacgctccgaactcctacgagcaacctaaagaatacatggtagagaaaagaacagtggatagtaaaactatattaaatataaatatggcaaaaggcggtggattcgttattcgtttggaagcagaaaactaatatcgctatgaataaaatttaaatgagattattacatctcaaagaacggtaccatctgatacacggaatggtacactccaatacattaaacggtaccatccagtatattggaaggtaccgtttgtatatcctatcataatcccagtttcgccgaaatctccagcatccgctgaataggcctcactgccttctccgctatttcgggatctacggtaatctccggtgactcattcttcagacactcatagagcttctctaacgtattcaaccgcataaagctacactcgttacatccacaggtgctatcgttcggaggagcggggataaacgttgtctgcggacacttcttctgcatctcatgcaagatacccgattcggtagccacgatatacgtattctccgggtggttcaccgcatacttcagcagtgcagctgtagaccctaccacatctgccagtttcagcaccgtgcttttgcattcgggatgtgccagcaccaatgcttccggatgctgtgttttcagctccacgatcttttccaccgagaactgttcgtgcacatggcaggctccgtcccaaagcaacatattcctgttcgtaactgagttgatataatttcccagattccggtccggaccaaagattattttctcatctttgggaaaactttccacgatctgccgggcattggtggaagtcaccaccacatccgttactgccttcacagcagctgtcgtgttcacgtacgaaataacggtgtgccccggatgctctttgacaaactgcgcaaactgatccgccggacaactgtccgccagcgaacaacccgcttccatgtcgggcaccagcactttcttatccggacaaagcaccttcgctgtctcacccataaagtgaacgccgcacatcacaatgatgtccgcctctgttttggcagccagttgagccaacgccagactgtcgccaacgtaatcggcgatatcttgtatttcacccttctggtagtagtgccccagaatgattgcattcttttctttcttcagctcattaatagcctttatgagattattcataataatattcttttatttcttccttttaaaaaaaatcctttgttagtgatgatagcctgttaatagtgttagcaaataaatacgatttttcttgccggataagttattagtccatacttctgctttattagtccgttatgaacggaaggaaaggtggaagattgactatttattatcttcattatcaatgcaagccctatcaaatgggagaatgctattaactccctgttgataaagtgcaaagttaaaaactttatggatataaacaggcagataagtgctgaaaaatatgttgatgtctgcatagaaagttttgtctttgttttttggaatgttcataatgaaggccccttataccttcttttgaataatgcaagaattatttttcaaattctttcccgattgttttgacaggttttaaaccgttatcaacacctctgttaacagaaaagaactacctttgcaaccgaaacgtaataaatgaacaacgtatgcgaaaactgaaaataacagagctgaaccgtatcagtgccgaagagtttaaacaagcagaaaaactgcctttggtggtagtgctggatgatattcgtagcctgcataatataggttcggtattccgcacgtcggatgctttccgtatcgagtgtatctatctgtgtggaataacggctacccctccccaccctgaaatgcataagacggctttgggcgcagagttcactgttgactggaagtatgttaataacgctgttgatgctgttgataacctccgtaaagaaggatatattgtttattcgatagaacaggcggaaggcagcattatgctggatcgactcgaactggacaagacgaagaagtacgctatcgtaatgggaaatgaagtgaaaggggtgcaacaggaagtgattgatcattcggatggttgtatcgagattccccaatatggtaccaagcattctctgaacgtgtctgtaacaacgggcattgtcatctgggatttgttcaaaaagctgcgttgacggtgtaaaatcagtcggttaataattagttaataagtggttgatatcatagttaacttgctattaaccaactatttttttctgttcataattatgtgtgatgataagaatattgtagcaacttactcttggttgagtctgattgattcagtgtttattaaccatcctgtttcaagctgttatcagatggcatcacagctattaatagctgacttctcaactgttaatacttgtcatgcagactattaacacctgacaggtcaactgttaataccttagaagtcagataaagtggggtaattttcctatggtgatagtggaattggatttaatagaaatatgatggttaataacaacgttgataaccttatgacaaggtgaatcagatttgtccgttctctaccagcagcacaactctttccgtcagtttatcttctcccaacggatcatattcctttttcagactggcaccgaacagtgcggcaaacgtttgatagaatcctgctttgaaaggtcccataaaagctttcaccagttcataactggtggaattactttggcggtctatcaatttaatcaagagtttgccttgtgtaaaagagagtttcttcatccgtgcggtatattgttccttcagtcctttttccacccgtttgagatgtttttggcgagccttctcgttgggtaatgtctgaagatactcgtaagtttcaataatagcctggttaatttctttggagataggatataccttctttacgttacgtactaggcggtagtattctagccgttctttttcgtttttgaattttagcgggcggaagatataaacagtccttaactggacacatggaatggtatctccgttgtagatacacattggaactaagtatccgttgatgctttgcttgtcctgtgcctgcatcttcgatgaacagactatagcaaacgccatcattattactatgttaagtctccttttcacgttacaaaaatagaattaaaattttattattcagacatttcttttagacgttaacctatttaaagtatctttgcgcccttgtctgtaaaaacgcaaggtgtaaacaaataatttattgatgaaaactactcaactatttcggttgataagtattataaacagcctgttcattattcctgcttgtagtgctcaaaacccttctcaaagtcttatagaagatatttttgaagatttatctgttaataatagtgttgataatgctgttaatgaacccaattgggagaatgaactggaagaactgtccgtccgccttcacgaacctgtagatttaaaccgggctacccgtcaacaactggaacaatttccttttctcagtgatattcagattgaacatctgctagcctatatatacgtgcatgggcagatgaaaactctttatgaacttcagttgatagaggatatggacaggcagactattcagtatctattgcctttcgtatgtatcaaagctattaacaatgagtcgtcttttcggtggaaaactatgttgaaaagcgcaatgaagtatggaaagaatgaagtgataactcgcatagatataccgttttacaagcgaaaaggttatgaacatacctatttgggaccttctgtttataactctgttaagtatgctttccgttatcgcgaccagctctatgcaggtttcgttgcggagaaggatgccggagaacctttctttgctctgcacaatcgtcaagggtatgattattattctttttatctcttactcaaagattgtgggcggttaaaaacattggctgttggtaactatcgattaagtttcggacagggattggtgatcagcacggattacttactgggaaagaccgtatatgcttcttctttcaacacccgcagcggaggaatcaggaaacattcttctactgacgaaactaattattttcggggagcggcggcaaccttaagcattacaaagcaatggagtatatccggtttttactcacaccgttcgctggacggtgtgctgaccgatggcgaaataacttctatctacaaaaccggactacaccgcagtcagaaagaagccgataagaagaacgtattcaccatgcagctgactggtggaaacatgagttatcaacagaatcgtatccggctgggtatcaccggtatttactatgttttcaaccgaccttatgaaccgcaattaacaggttattcccaatacaacattcatggaaatcagttctacaatttaggaatagactatgcttaccgctggcatcgcttttctttccaaggagagacggctatgggaaaacaaggcagtgctactttgaaccgtcttcagtattcaccggtggaaggaactcagttgatgatcgtacaacgatactactcatataattattgggctatgttcgcccattcttttggagaaggaagtgcggttcaaaacgaacagggatattatttggggatggaaacttcccctttccgccattggcacatccttgcttccttcgatctgttttctttcccgtggaagaaataccggatcagtaaaccttcccgaggtatggacggattgcttcaggctacgtttactccgcacagtaatctgacaatgtacttgaaatatcgttataaacagaaagagcgtgacttgacaggtagcaaagaaaacctaacgcttcctatttttcatcaccaacttcgatatcgtttgaactatttttatggagatgtgtttagctgtcgtacaactttagattacaaccattttcattctcaagacagggctgctagtaaaggatatcaagttacacaaatgatgtcctcccaactgccttggaccaggctgtttgctgacgttcaaggcagttatttttctacagacgactatgattcgcgggtatatgtatcagagaagggattgctttatacattttatactccttcctttcaaggccgtggatttcgctgtgctgttcgtctgagatatgaaccgaatgaacattggatgtttataactaaattcggagaaaccgtttatctcgaccggaatgaaataggttccggcaatgatttaatctttggaaataaaaaagctgacgtacaaatgcaactccgtattaagttttaaagtatctttgcctctggatattatgaaatagtaaatgataaaataatgtgagtttgatgtgataaacgttcgtattgatattgaactcatattaaaacaattaataaaaagatgactattatttttccttcacccatcttcggccctgttcattcccgccgcttgggtgtgtctttgggaatcaacttattgccggaagacggcaaagtctgctcgttcgactgcatttattgtgaatgcggcttcaatgccgaccatcgtccgaagaagcatttgcccactcgtgaagaagtgcgcatcgccttggaagaaaagctgaaagatatgcagaagaacggtcccgcccctgatgtactcacatttgccggaaacggtgaaccgactgcccaccctcattttccggaaatcatagaagatacactggcacttcgtgaccactatttcccgaatgcaaaagtaagtgtattgagcaattctaccttcattgaccgtcctgtagtattcgatgcattgaacaagatagataataatatcctgaagctggatacggtgaacgaagaatacattcatctcctggatcgtcccaacgggaaatattccgtaaggaagatcatcgaaaagatgaaagaattcaaaggaaattgtattattcagactatgtttctgaaaggtagttaccttgggaaagatatgaataatacatccgatgagtttgtgctcccgtggctggaagcagtcaaggagatcgctcccagtcaagtgatgatctatacgattgacagggagactcccgaccatgacctgcagaaagccactcatgaagaactggaccggattgtagaattgataaagcgaacgggaattccggcaacagcgtcctattgatggataagatattgattagtaaatagaatacc

SEQ ID NO: 4574 - DNA, 15945 bp, Unknown
  gut microbiota DNA sequence
agggtcaatttctcaaacaatatcgggtgaaaatgaaaccaaatggactaatacttattaaaaaacaaatataatcaaaacgctattaattaaaatcatgtatatttgtgtttgagatttctaggaatctcaaacacaaataattatattatacttataaactgaacattatgagaaagtctattctatccattatgttactgtttgccatcagtatggcagctagtgcacaaaaatttgcattgatcgacacggaatatattctgaaaaatattccggcatatcaaagcgctaatgagcaattgcaggaagctacgaagaaatatcaaagcgaagtggaggtaattgccaaggaagcacagaagatgttccaggactatcaggcacagtcctctactctctctgcggcccaaaagactaagaaggaagatgagattgtagcgaaagagaaatccgctgccgaactgaagcgcaaatacttcggtccggaaggcgaactggctaagatgcaggagaagctgattaatcctattcaggatgaaatatatggtgctgtaaaggaactgtcgcaactacacggatacgaccttgtactcgacagagcctctgctgcaggcatcatttttgccaatccacgtattgatattagtgatgaagtgctgagaaaattaggatattcaaattaatttcatacatttgcatcgaaaataactaaaaatcattcaaataaattatagaactatgctaaaaaaaattgcacttgtattgatgcttgcactcccaatgggtgtatttgcacaaaatctgaaattcggtcatattaatgcccaagaaatcgtttcagcaatgcctgaatttgctaaggcacaatctgatattgaagcactagacaaacaactgaccagcgaattacaaagaactcaggaagaattcaacaagaaatatcaggaattccagcaagctatcgctaaggactctcttcctgctaacatcgctgagagaagacaaaaagaactgcaggatatgatgcaaagacaagagcagttccaacaggaagctcaacagcagatgcaaaaagctcaggctgatgcaatggctcctatctacaaaaagttggacgacgcaattaaagctgtaggtgctgccgaaggcgtaatctacatcttcgaccttgcaagaacaccggttgcttacgttaatgagtcacaaagtattaatctgactcctaaggtaaagacacagctcggcatcaaataagaagctataagctataaaataccgaaagggaaagagaaaagaagatcatacttctttctctttcccttttttcatgtaactttgcgtatataaaaccgcactcgtcatgaagcaacatctatctcatacacccggaccaatcggagttttcgattccggatacggtgggctgactatcctcaacaagataagagaggcactgccggaatatgattatgtctatctgggagacaatgcacgcactccttacggtacacgttcttttgaaatcgtgtacgaattcactttgcaggcagtcaataaattgtttgaaatgggatgtcatctcgtcatcttggcctgcaatacagcctctgccaaagcattgcgcagcatacaaatgaatgacttgcccggcattgaccctgaacgccgtgtactcggagttatccgccctaccgttgagtgtataggcgacattactcaaagccgtcatatcggagtactggcaacagcaggtaccatcaagtccgaatcgtatccattggagatacataagctattcccggatattcaagtgagtggaatggcatgccccatgtgggtaccgctagtggaaaataatgaatcacagaacgaaggggctgattatttcatccggaaatacattgaccagctgctatccaaagatcccgaaattgatacgatgattctgggctgcacgcattatcctatcttgctccctaagatacaaaaatacactccgaagcatatccgtattgtcgcacaaggagaatatgtagccgaaagtctgaaggactacctgagcagacacccggaaatgaatgccaagtgtacccaaaacggcagttgtctgttttacaccacagaagcggaagagaagtttgtcgaatcggcctcttccttcctgaaccagcaaatcgacgtaaaaagaatttctctcgaataaatatgggaaagcagatcaatctttccttcttttttgttatatttgtatacataacctcaaatagcataagattatgaaagaagaagattatagcagggccatagaagtattctctggttctccatgggaagcagaaattatcaagggattgttggaaagtaatgatatccgctgcgtcattaaagatggtatcatggggacattagccccctatattgctccatctgtatctgttctggtcactgaagaccagtacgaagccgctactgaactgatcagaagccgcaacgagaaagatactgactgatacggtccagtccttcccggatattctccagcgaattcgcataggagaaacggacatatccttcgcctcccgttccaaaatctataccgggagtgatgccgacatgcgcattttcgagaacatcgaatgcaaagcgataagagtcggtagtgaacttacgtgcatcagcgaaaatataaaaggcaccctgaggctcaactttgatctcaaatcccatttcccgaaggcggctgatcatataccggcggcgttcatcatagatctgtttcatccgctccacatccgagtcagcctgtcgcaatgcggcaattcccgcttgctgagcgatgctggacgcacagataaacagattctgctgcaacttctgcaaagaacgcatgcaggatttcggtgctatcagataacctaagcgcagccctgtcatcgcaaaccgcttggaaaatccgttcaggacaaaagccttatccgtatattccagaatactatgcgcacgtccctcgtataccagtccgtgatagatctcatccgaaataataggaacgcccaaagatgccacacttttcaggaaattctcatccagcaacatacccgtcggattcatcggcgaattaataaaaatacctgccgtatacggagtaacgcacttacggatcgcctctatatcatattgcaaaccattctcttcggacagaggcaccaagacaggttttgcctgggcagccaacacgaagttacgataacacgcatatcccggattggacagaatcacttcactgtccgagttgcaaagcaacatcaagaccagaaggatagagggagaagaaccggaagtgacgacaatacaatccggatcgacggtgactccatattcacgttgataaaaagcggctatttcacgacgcagttccggattccccaaagagtgagtataatgtgtgagatgccggtcgtaggcagccttagcagcttccgccacacaaaccggaacgtcaaagtccggctcaccgacttccaggtggataacgtccacaccttgtttctgtaattcatttgcacgctccaatacatccatcacgataaaggaggtcatttgttctacttggggattcgtatgtttcattgtttttcttttatctgtcaggctgcaaagataattcttttcagcctgtttttgtaacatatcgacaaaaagctctatatttgtactttcaaatcgttagtaaggatgaaacaagagtttacacgaatagcagtaaaagtaggcagtaacgtattggcacgccgtgacggtacattggacgtcacccgtatgtcggcactcgttgaccagatagcagaattaaataaatccggagtagagatcattcttatttcttcgggagctgttgcttcgggacgcagcgagatacacccgcagaaaaagctcgacagtgtagaccagcgccagttattctccgccgtaggacaggctaaattaataaaccgctactatgagcttttccgtgaacacggcattgcggtaggtcaggtactgactaccaaagagaacttcagtacccgccgccattatctgaatcagaagaactgtatgacggtgatgctcgaaaacggcgtcatccccatcgtcaatgagaatgatacgatttcggtcagcgagcttatgttcacggacaatgacgagctttccggactgatcgcttccatgatggatgcgcaggcattgattatcctgagtaacatagacggaatctacaacggttcaccctccgatcctgcctccgctgtcattcgggagatcgagcatggaaaggatttatccaactatatccaggctaccaaatcgagtttcggtcgtggcggtatgctgacgaaaacgaatatcgcccgcaaggtagccgacgaagggattacagtcattatcgccaacggaaaacgggataatattctcgtagacttgttgcaacaaccggacgatacggtttgcacgtgctttatcccttccaccgaggcggtatccagtgtaaagaaatggattgcccacagcgaaggattcgccaaaggggaaatccatattaacgaatgtgccacggatatactcagctcggagaaggcagccagcattcttccggtcggaatcacccacatcgaaggcgaatttgagaaagacgatattgtacgcatcatggacttccagggcaatcaggttggtgtaggaaaagcgaactgcgactccgcacaggccagggaagcaatgggcaaacatggcaaaaagcctgtagtacattacgactatctgtatatcgaataaaaaacataaaacgtaaaaaggagcaaatgactacaaatttaaacggaactttcgctgctgtacaagctgccagccgggaattggcattgctgagcgacgacaccatcaatcagatactgaacgcggtcgctgatgctgccattgccgaaacaccctttatcctgtcagaaaatgaaaaggacctggcacggatggacaagagtaacccgaagtacgaccggttaaaactgacggaagagaggctgaaaggcatcgctgccgacacacgtaatgtagccactctcccctccccgctgggaaggattttaaaggaaacctcccgccccaatggaatgaagctgaccaaagtcagtgtccccttcggagtaataggcatcatctatgaagcgcgtcctaatgtcagcttcgacgttttttccctttgcttgaaaagcggaaatgcctgtatcctgaaaggtggaagtgatgcggacgattccaaccgtgccatcatcagtgtcattcacaaggtactcgaaaagtttcatgtcaatccgcatatagtagaactgctcccggctgacagagaggctacggcagcattactgaatgcgacaggctatgtagacctgattattccgagaggaagcagcaatctgataaatttcgtgcgcgagaatgcgcggattcctgtcattgaaacaggagcaggtatctgtcacacttattttgatgagttcggagatacccggaaaggagcggatattatccataatgccaagacacgccgtgtcagtgtctgcaatgcgctcgactgcaccatcattcatgaaaaacgtctgggagatttgcctgcgctctgcgatcaactgaaaaaaagcaaggttactatctatgcagatacacaggcttatcaggcactggaaggacattatccggctgagttgctgcaacctgccaccccggaaagcttcggaagagagtttctggattacaaaatggctgtcaaaacggtgaaaagttttgaagacgcactggggcatatacaggaaaacagttcaaggcacagcgaatgtatcgtgaccgaaaacaaagagcgtgccgccttgtttactaagatagtagatgcggcatgcgtatataccaacgtatctaccgctttcaccgacggtgcacaattcggcctgggagccgaaatcggcatcagtactcaaaagctgcatgcccgcggtccgatgggactggaggaaatcacttcctacaaatgggtgatcgaaggcgacggacagaccagatggtaaagtgaggaaacgacaaatgatcaattggacaataacgattaatgatagataaaatgaagaaatttacttgtgtacaggacatcggcgatttaaaatcagcccttgcagaagcatttgaaattcaaaaagaccgcttcaaatatgtagagttgggacgaaacaagacattgatgatgatcttctttaattccagcctccgtacccgcctcagcacacagaaagctgctcttaatctgggaatgaatgtaatggtgctggacatcaaccaaggtgcatggaaactggaaacagaacgtggcgtcatcatggatggtgacaaaccggaacatctgctggaagcgattcctgtgatgggttgttattgtgacatcatcggagtacgttcctttgcccgtttcgaagatcgtgattttgactatcaggagactattctgaatcaatttatccaatattccggacgtcctgtcttctcgatggaggcagctacccgccacccattgcagagctttgccgatttaatcaccattgaggaatataaaaagacggcacgtcccaaagtcgtaatgacttgggcgccacatccccgtccattgccacaggctgttcccaactcctttgcagagtggatgaatgccactgactatgatttcgttatcactcacccggaaggatatgagctggcacctcaattcgtaggaaatgccaaggtagaatatgatcagatgaaggctttcgaaggagcagactttatatacgccaagaactgggctgcctatacaggcgacaattacggccagatattaagcaaagaccgtgaatggacagtcagcgaccgacagatggcagtaaccaacaatgctttctttatgcactgcctgcctgttcgcagaaatatgatcgttacggatgatgtaatcgaaagtccccagtctatcgttatccccgaagctgccaaccgtgaaatctcggctacggtggttttgaagagattgattgagggattggaataaacggaacatctgtgaatgaaaccttgcttttattctcgcacctatgagaaaagattctcatgcctttgagaattttttctcattgtggtgagaactttttctcataagcatgagaatacattgagaatatagcaacatctatttaactgtatactagcacgataacgattgcatcccttcagaattttatgtaaagcgcaaccatttattctagaatagatagaaaaaagccgtacagcaacaaccttagtattctatctcctttcctgccgcctgccaggcattgaatcctttaccaagctccacaaccttaaatcctttttcactaaggatcgcagcagctttcttgctccgtttaccgctacggcaatacaacgcaaccggtttgttcttttgcaacaatgaatccgccatcgaggcaaaagagtcatccatcacatttatattgatcgtttttgcaatatgtccttctgaatattcagccagtgtacgaacatccagacgctgcacttcttcatcctgaatgatagaatcgaaatcctctacattcaccgttttaaagtctcctttctgctgacaggagaaaagagaagagagaaataaaaataatcccacgactaattgattcattttaaacatatgtactatcttaatcagttcacgcccggaacatattcaaatcccggatcacaatacttgcttgattctaccaccacaccatttttatctgtggtatgatacttgaattttatccttatggtttgatgaggattttcttcatccacatatttcgtcagaggaacagaaatgtaagcacgacgattatagttctcctcatccccattcgcatcatgaaacagagacaaagtaacgactgtctcatccccttccacctcgacgctctcttctatcataccaaacacgtgctgtttgccactattgatattgatcttcacgttcagaatcatattcaaatagtcacgccccagccaaatgctggtcacgtctaccggatcatacttcagtccgccttcaaaagccgggtcgtcagccccctttggctccggtgccaccaccgactgcaatgagtatatgacagccgtagcatcctccggatttacttcatagttactgattacacgcctagccgagttcggagaaatggttgatccggtacggtctttcgcaacagtcaacagctctcccttgtcaggaagcagactctgtatcagaccatccgccccagccttcactgtgacaaattccaacttcacagaaggataatagtaatcatcatcatccccgcaggcagtcatcaggaaaagcatacccaaaagccagagtgtatgtaactttactttattcattggcaagcagctaaatagttcaccaacggattggcatacattaataacaattttccacgcaaaaagtcttcgtctttattcggaatctttattttgcccagttgttgctcgatataggtaacaaatcgcagtttctcttcgggggtgtaatgaccggcaaactcggatgtacccttcagcaagtcataggcaacgtaattacccgaatagatccggtagttactatgaatcctctggtcgatgcaggcagatatgctggagaacagttcctgcttcggcaatgaacggtccagctgcgccaacctgtcattgatacagggagccgtctgaaaatgaaccttccctttatatccgaaaagaccggtctgcatactgatcaaatcgtcctgagtggttttcttatatccttctatatctcttttcaactgaaactcctgcgctttcaggaagtcacagggatcatattcgtatgaaatggcaagaggagcgatattcatctccatcagacggtcgatcaagtcgccttcaccacccatcgccagcatcttcagtacgctatcctgagtacggtcgttcgagtctttggcacgcccttcacgctgggcaatccagatggactgcttcttctcactaatggtataatgcatataacgggacatccgtgccgaagattccagcatctgccgcatggtcagcgcccgttgtacaataaacgatttgttgacacgaaccagcttcttgatccacggataaaccagcagattgtcaccaatcgctatctctaccgtatccattccctgatcaatcagcaagatagagaggaagcccgaatccaatataatatcccgatgattggagagatatgtataagccttgcttttatccggcacagccgtatgatccagagtcagcccatccgtatggtccgccgctattttccataaaataccataacagaatgtttcctgaaaatccagcttgctcttacaagcgcgtattttctgcgccaaaagttcaaaggggacgttcggtatcgcatcagtagccgccttctgaaaagcaggatcagcaatcagctcctcaaaaatttgaggaagttcctcatcattgtaaggacgaatctcatcaaactctgtagtatccataagctatgaagtttagaggcaggtaataggtaataagtaataggtaataggctgcgctatgcccacacaaatttaatatttaatatctattacttattacctgttacctattacttaaaatttattttctattatatcagtcatcacatcctttatatccagaccggcagcacgcacttgctggggaataaagcttgtagtggtcatccccggagtcgtattcacttccagcagattgatcttttcgccggctgtcacaatgtaatccacacggatgataccggaacagcccaatatatcataaatggccgaggtcagcatttgcacgcgattcgtcagttcgtccgagatgcgtgcaggagttatctcgtctacctgaccattgtattttgcatcataatcaaagaactcattatgtgtcaccacttccgtaggcgggaagatgacggtcttgtctttggttttatagcagccgcaggtcagctccgttccttccataaatgcttctacgagcacttcctgggcttcttcaaaggccttaacaatggccggctgtatttgttctttcgtcttaacctttgttacgccgaagctcgaaccgcccagactcggcttgatgaaacaaggcaaaccgatcttttccataacatcttcgtcggaaaccgattgtccctgacgcaatagcaacgattctgcaatacgcactccgaaggctttcaggtattggttgcaggtaaacttgtcataggtgatcgccgcagccagcaccccgcaacaagagtatggtatgtgcatcatgtcaaagtatccctgaagacggccgtcttcgcccggagtaccgtgaatggtaatataggcaaagtcaaacctgatcttttccgttcccagcataaagctgaaatcattgcggtctaccggtgcttttgcaccatccggcaattgtacttcccaacgggtcccctgcatctcgacaatgtacagtgtgtacttttccttatctatgaaggaatatattccctgtgcactacgcagggatacatgaaattcggaggtgtcacctccggctacgatagcaattgtgcgtttcattctatttctctgttacttatatagcctcgccacttctcgataagccgggtcatgtcatccggaagttcggaagtaaagtacatctcttcgcctgtgacgggatgtacgaaccccaatgtcatggcatgcagagcctgccggggacaagtgtcaaagcaattatttacaaattgtttgtatttactaaagtgagtacctttcagaatttcgtgaccgccatagcgttcgtcattgaaaagtacatgcccgatatgtttcatgtggacacgaatctgatgagtacgtccggtttcgagtatgcactctaccagcgtgacatatcccagccgttcaagcacccgataatgagtgaccgcgtgcttgcccatcgacgggtcggacataaccgccatctgcatccggtctttcggattacgggcgatactgcctacaatcgtgccttcatcctgttccacatttccccagacaagggcacggtatctgcgtttggtcgtcttattaaagaattgtattccgaggttggtcttggcatccggcgtcttggcaatcaccagcagaccggacgtatctttatcaatccggtggaccaggccgacgtgcgggtcattggcatcatattcaggaatatctttcatgtgccatgccaacgcattgacaagcgtaccgtgatagtttccgtgtcccggatgtactaccagtcccgcaggcttgttcactaccattacatatggatcttcgtaaacgatattaagggggatattttcgggaataatctcgttctcataacgaggacggtccatcatgacggtaatgacatcgagcggcttaaccttgtagctgctcttcaccggcttaccgttagccatgacgaatccatcttcggcagccttctgaatacggttgcgcgaagcattgacaatacgttcgaacagatatttgtcgactctgaccatcgcctgtcccttgtctacgaccacccgaaaatgttcgtaaagctgggattcgtcaccgacaggttctatatcatccaaatcattctccagttcatccggaagttcttcctcgatcatgtgaatctgtttcgttatttatcaattaaaaccaactatcatcctgacttgaaggggattctgaggaaacaggttcatctgccccttcaacattttccatggagtcgctttccaacggttcgttttctccgtttcctaccatcagtgtcaatgcagctcccaaaggtactttatctcccgcattcaatgagcgcccctgatatttaatgccgtacacccagtccttctcaccgttcatcaactgaatctcggtcagcttgaatccggcagcaagcactttcgcctgtgcctggcgcagagaactgttgtccgccacatcgggaacagcacgcaaaggaatactcagtgtattgatagtcaggtaaatggtgcggccttctttcactttttgtccgattcccgggttgacatcaagtacaatgccagctgccatattcttcacataattagaatcggaaacgacacataccaatccatgattgcggaacatttttgaagcttcatccacagtcatcccttttacatcgggcacaaccaccgcctcaccgtgacgagtataaacatccagccatttcatcacgccgaacacaatcagcaccactgccacaatcatgacaaggatattcacccagaaatatttatttgttttaaaagaaaagaattctttgattgtcatacgctttgctgttaatccgcgccaaagatactacaaattagttgaatttcggaatagtgggcaatgaaaatgtccctgcataaatgcaaggacacctgtcatcaccacaattgttgcaactatattccccactcctatagatttcaacaaccttatattctggaatgcggcttccggattctctgagcacaaccgtctgtcgcatatattccgtctatgatctgtgacaaagaaagctaaaaagtgacaaagagcattccattaaacattatttaatactctatttaactactgtgccaagagtcctgtactttttatcataaaaaggaagttataaccaactttaatggaaatagaagcaaacaaaaaaggcggagtttaaaactccgccttttttgtttctgagtgatgattaccacttctgtccgttgtactcatcagaaacagtcagtttctttctgcctttcgcacggcgagcagctaatactctacgaccattagccgatgccattctctcacggaaaccgtgtttgttctttctctttctgttagagggttgaaatgttcttttcattactgtatcttgtttttatgttattattctacgtaatcgggctgcaaaaatagagactttttttaaattaaccaagcgataagtcatttttgctcaaaagtttttgtgttttttactgatttagattacttttgcactcgaattacgacgaagacaattaaataacaataatataataagaaaaacagcagtatgattaatgctcaagacatcaaaaacggaacttgtatccgtatggacggaaagctctatttctgtatagaattcctgcatgtaaaaccaggtaaaggtaacacatttatgcgtaccaagctgaaagacgtagtaagcggttatgttctcgaacgccgtttcaatatcggtgaaaaactggaagatgtacgcgttgaacgtcgtccataccaattcctgtataaagaaggagaagactatatcttcatgaaccaggaaacttttgaccaacaccccatcgctcacgacctgatcaatggtgtagacttcttgctcgaaggtgcagtgctggacgttgtttctgacgcttctaccgaaactgtactttatgcagacatgccgatcaaagttcagatgaaggttacttatacagaaccgggaatgaaaggtgatacagccaccaacacactgaaacctgctaccgtagaatcaggtgcaacagtacgtgtgcctttgttcatcagcgaaggtgaaacaattgaaatcgacactcgtgacggttcttacgtaggacgcgtaaaagcataaatgtcatacaaatgacataaagaaacggtggatttgcttcggcacttccaccgttttttattacctttgtccatcactaaccctaatattaagatacaaaagaatgaaaaagttgatttacacactgctctttgtccttatttccgttgcagccaacggtcagcaggcaaagtacgtattctatttcatcggagacggaatgggagtcaatcaggtaaatggtacagagatgtatcaggcagaactgcaaaacgggcgcatcggcgttgaacctttattgttcacccaatttccggtagcaacgatggcaaccactttctccgcgacaaactctgttaccgactctgccgctgcgggtactgcactggctaccggaaagaagacctacaacagtgccatctctgtaggagaagacaaaaacccgattgaaaccgtagccgaaaaagccaagaaggccggaaagaaagtaggtgtcactacttccgtcagcgtagaccacgccactcctgccgctttctacgctcatcaggcagaccgtaatatgaattatgaaatcgctgtcgacctgacaaaagcgaactttgacttctatgcaggcggtggttttctgaaaccggacaagacgtatgacaagaaagacgctcccaacatcttccctattttcgaagaagcaggttacaccgtagcacgtggctacagcgattataaagccaaaagcaaggatgccggcaaaatgatcctgatacaggaagaaggcaaagatccttcctgcctgccttatgctatcgaccgtaaaagcgacgacttgactctcgcccaaatcacagaaagcgcaatcgacttcctgaccaaaggcaagaacaaagggttcttcttaatggtagaaggtggaaagattgactgggcttgccacggtaatgacgccgctaccgtattcaatgaagtaaaggacatggatgacgctatcaaagtagcttacgaattctacaagaaacatccgaaagaaacactgatcgttgttacggccgaccacgaaaccggtggtatcgtactaggtacaggcaaatatgcgttgaacctgaaagcattgcaatatcaaaaacattctgctgacggattgtccagacgtatcagcgaactaagaaaatcaaaaggcaacaaagtgacttgggaagacatgaaagaattcctgggtgaagaaatgggcttctggaaacagttccctatttcttgggaacaggaaaagaagctgcgtgacgagttcgaacaatcctttgtcagaaataaggtggtatttgccgaaagcatgtactctaaaagcgagccgatggctgcacgcgctaaagaagtaatggaccagatatctatggtaggctgggtaagcggcggtcactctgccggttatgtgccggtatttgccatcggtgccggttctcaactgttcggtgagaagattgacaatacggaaattccgaaacggatagctaaagctgccggatataaataaagaattgactgcacgaatatgtaatcaaaacactatttattttcatttaggcacggatttcacggattaacacggttctacaattaaagaccgtgaaattcgtgcaatccgtgcctaaataatattatcattataatagatgattttcattgggtcccttctcttgatatgtttcccgttaggaaacgggcgttccctcaccgagaaacgagagttacctttaaaggaaacgatcgttcccacaccgggaaacggcagtttccaaagcaggaaattcatggaaactctaagccattgatgtgtactggttttagttgacaacttcgtttgttataactgaattagtttactcaatatactttaatatctaaataggtttacttttgttattcttattcctatgttagttgtcttttgttggtgcttgcaaatttatgcatcttcctttatttacgcaagccttcttcaggaaaatgtaatgttgccaacaaccaaaaactcttcggtcggggatcgccctagcggcaaggggcgggaccacccgtcccgacgagcgggtattatgctgttaatcctcccgtttcgctgaccacttccataggtgtcctcatgtttatcccttgatgaggccgcacatgattatatac

SEQ ID NO: 4575 - DNA, 2824 bp, Unknown
  gut microbiota DNA sequence
cggggctatggatgagccgcctttacaggcacaacctcatggaagatgtgttcaatatggaaaatgagagtttcatgcaggaaacccgactgatggagaatgagtattcggtaaatctcccaacgagattctattataaaaaacgctggaataacggatttgtcaatattgtcaatattttccgtgcctgcatggttatcgggacaccaggtagcggcaagtcctatgcgatagtcaacagttacatacgccagcttatagccaagggctttgcgatttacatctacgattacaagtttgatgacctgtccaccatagcctataattctttgttgaagaatatggacaagtacgaggtcaagccccggttctatgtcataaatttcgacgatccgcgcaggtctcaccgatgcaatcctatcaatccggaatttatgacggacatttccgatgcgtacgaggcgagctatacgataatgctcaacctcaatcgcacctgggtgtgacctgtaaagtcacgtaattgattgttagacagcaatattaattgcatgatttaacccgctgttccgtcagcggtagcctactataaggtgcatctccagtgatgggttgtgccaagcttataggacaaagtacactttccgaaaggacaagactgaaccgtgagggaatgtcaaggacggttagtatcataccgttgagtggcgaggctggatagcatggttaacgtaagtgaactgactttagccgtcgtaaggtttgaaggagcgcaagatactttagctctcaccaaaaggtaagcagtcggataacccttgcccatgttggggttacacggacacagcactgccggcggacttggcagaacctaaactatccgtttgtcaattacgtggaacagggcaagcctgtatctctctcgtaagaatgcgagtaagcgaaccgcaaggcaagccgaatggggtgcaggtatgagataacggaaaaagcgaatgccaccctgtaatggggtggatacggattgaatcaacatcacgggttgttattggtgacatcatccgacacgaaagtgggcagacttccgtatatggtaactctttacaagataacttttagaactttcaaaaggaggaaagcaaatgaacgaaactaaaacatcgtgtgcgcctgctgatagtaggaatctaacttgggacggcatggactggtccaagtgtgaagcctatgttcgaaagctacaagcgcgtattgtaaaggctcaaaaggaaggcagacataacaaggtgaaagccttgcagtggatgctgacccactctttttacgccaaggcattggcggtaaagagggttacttccaacaaagggaagaaaacgtctggagtagataaacagctttgggattctcccaagcgcaagtacaaagcaatcggtgaactgaaacgtcgtggttacaatccgcagccgcttcgtagggttcacatcaagaaaaagaacggtaaactccgaccgttgggaataccgacaatgaaagacagggcgatgcaggcattatatctcatggcattggaaccgatagccgaaacgacaggcgaccgcttttcttatggtttccgcaagaaacgcaggacaatggacgctatccgtcagattgatacggttctaaaccgccagcattcccccgaatggattttggagggagacattaaaggctgcttcgaccatatcagccacgactggcttcttaatcatatccctatggataagacgatactcagaaaatggctgaaatgtggagctgtattcaatggcaaactattcccgacagaagagggtacaccacaaggaggtatcatatcaccgacacttgcaaatatagcacttgacggacttcaaccactcttggctgaaagattcaaaagattatggcgcaacaataagacattccactacaaggtaaaccttattcgttatgcggatgactttataatcacaggtcgagataaggagctattggaaaacgaagtcaaacctatcgtgatagaatttctcaaagaaagagggctgaccttatccgaagagaaaactaccattacgaacatatacgacggttttgatttcttaggtttcaatgtgaggaagtttggcaaaaggctatacacatccccgtccaaagatgcacagaaacgcttcagggcaaaaatcggtgacatcgttaaaggacataaaatgtgtaagcaggaatcgctgatacgaatgcttaatcctgtaatcacaggttggggcaactattaccgatatggtgcatcaaccgatgcttttcatggttgtgacaatcacatttacaatctcacgaagaaatgggctttacgtcgccatccaaagaaacgcaagtcttgggttgcagacaaatattggcatgaaattcgggggcgtaaatggacgtttgcatggaaatatgaaaccaagagcaagaaagtgaactacctgacccttaaaaggttgtcggatatacattataccccgtacaagcaaatcaaaggtgaggcaaaccctttcgacccggaatacgatgattatttctttcagcgaaaggagcaacaaatgctggaatctctcaagggacgtaagtctctcttatatttatggaacaagcagaaccggatttgtccgttatgtggcaaggaaatagattgtacaaaagcatggaacgtcaacgaaatatctgttggtggttcgattgtacggcaacttgtccacaacaactgctacaagcgaaataaacgaaaatgttgaaagtatgagccgatttctaacaacaaata

SEQ ID NO: 4576 - DNA, 37268 bp, Unknown
  gut microbiota DNA sequence
gggctttgaataaaacgtatcagaaaaatgtcattccttccggtcctttatttcgtggtgcaaacgttcgcggtgggaaagtctttttatcttttgattatggaaaagggatgcggagttcagacggaaagcctttacaatgctttgaagtagcggaatatgatggtatctattatccggcaacggctgaggttgtaggagaccaggtgaaggtgtatagtaaagaagtgccaaatccccgctatgtacgttatggctggcaaccttttacgcgggctaatctgatcaatcgggaaggactgcctgcttcgacatttcgtgccgaattttcgatgaaatgagatattttgtagcttcaataggaaatatttaacaaaaaagcaatatctttactccgttaatatctaatgcccccactatgatcttaaatttgacaggaaagatagcgccgatagcatgtggattgctatgttgctgtagtatggtttatgctcaaggtaatgacacttcggaagtcatgctactggataccggttgggaattttctcaatcagggactgaaaagtggatgccagctacggttcctggtacggttcatcaggacctgatcagtcatgaattactgccgaatcctttttatgggatgaatgaaaagaaaattcaatgggtggagaatgaggactgggaatatagaacctcctttatagtctccgaagagcaattgaatcgtgatggaatccaacttatttttgaaggtcttgatacctatgcagacgtatatctcaacggctcattactgctgaaggctgataatatgtttgtggggtatacacttcctgtaaaatctgtgttgcggaagggcgagaatcacttatatatttatttccattcacctattcggcaaacgttgccacaatatgcttccaatggcttcaattatccggcggataacgatcatcacgagaaacatcttagtgtgttcagccgtaaggctccgtatagttacggttgggactggggcatccgaatggtgacaagtggtgtctggcgcccggttactcttcgtttttacgacatagctaccatatctgactaccatgtcagacaattattgctgacagatgaaaacgctcgtctgtctaatgaactgattgtaaaccagatcgttcctcagaaaattccggctgaagtaagggtcaatgtatcgttgaatggaactaccgttacagaagtaaaacagcaggtgaccctgcaacccgggataaatcatatcactcttcctgctgaagtgacgaaccctgtacgatggatgccaaatggttggggaactccgactctgtatgatttctcggctcagatagcttgtggagatcggattgttgcggaacaatctcatcgtattggtttacgaacgattcgtgtggtaaatgaaaaagataaggacggagaatctttttattttgaagtcaatggcataccgatgtttgccaaaggagctaattatattcctcaggatgcactgttgcctaatgttactacggaacgctatcagactttgttccgtgacatgaaggaagccaatatgaatatggttcgtatatggggtggcgggacatatgagaataatcttttctatgatcttgccgatgagaacgggatacttgtctggcaggattttatgtttgcgtgtaccccttatccatccgatcctactttcctgaaacgggtagaggcggaggctgtttacaatattcgccgtcttcggaatcatgcctctttggcgatgtggtgtggtaataatgaaatactggaagctctgaaatattggggctttgagaagaagtttactccggaggtttatcaaggattaatgcatggttatgataaactgttccgtgagctgttaccttcaatggtcaaagaatttgattcggatcgtttttatgtgcacagttcgccttatctcgctaactgggggcgtccggagtcatgggggacaggagacagtcataattggggagtctggtacggaaagaagccatttgagtctttagataccgatttgccgcgttttatgagtgaatttggtttccagtcatttccggaaatgaaaaccattgctgcttttgctgctcctgaagattatcagattgagtctgaagtgatgaatgcgcatcagaagagtagtattggtaattcgttgatccgtacttatatggaacgtgattatatcattcccgaaagtttcgaggattttgtgtatgtcggattagtcttgcaaggacaggggatgcggcatggattagaagctcacagacgcaatcgtccttattgtatggggacattgtattggcagttgaacgacagttggccggtagtatcctggtcaagtattgattattatggtaattggaaggcattacattatcaggcaaagcgtgcttttgcaccggtcttgatcaatcctatacagcagaatgacagtttgagtgtttatctgatctcagaccggcttgatacaatggagcaaatgacattggaaatgaaagtcgtggattttgatggaaaaacgctgggtaagaagatacaagtacatttgttggaagttccggcaaatacttcaaaatgtgtttatcgtgcaaaactggatggctggctgactcccgaagactgccgacgtagcttcttgaaattgatactcaaagataaatcgggacatcaggtggctgagagcgtccattttttcagaaagacgaaagatttgcaacttcctccgacatcagtatcctatcaaatgaagcagacggatggtaaatgtgaattgactctcttttcatcaatgttggcaaaagatatttttattgagactccattgcaaggagcccgttacagtgacaacttctttgatctcttacccggagaacgtaagaaagtaattatcacttctccccggataaagaagggagaagaattacctgtcaatatcaagcatattcgagaaacctataaataaaactaatttattaactactaacacctaatttttattttatgaaacaactcctaaaattaacaggatgtgtggcactggcaggactgatgagctcttgtggctcggtacaagaagaagccaattatcagattatcccattgccacaagaaattgtaacatcgcaagtaaacccctttattttgaaaagcggtgtgaaaatcctttatccggaaggaaatgagaagatgcagcgtaatgcgcaatttttggctgattatctgaagactgcaaccggaaaagacttttcgattgaagccggaactgaaggtaaaaatgctatagtgctggcgttaggctcagaagtagaaaaccctgaatcttatcagttgaaagtcaccgatcaaggtgtcacgataactgcccctacagaagccggagttttctatggtattcagactttgcgtaaatcattgcctattgctttgggtgctgatgtagcattgcctgctgttgaaattaaggatgctcctcgtttcggttatcgtggtgcacatttcgatgttagtcgtcatttcttcacaattgatgaagtgaagacttatattgatatgctggctttacacaacatgaaccgtttgcactggcatatcactgacgatcagggatggcgtctggaaatcaagaaatatccgaagttgacggaaataggttctcaaagatcgggaacggtcatcggacgtaactccggtgaatatgacaatacaccctatggtggattctatacacaggaacaggctaaggaaattgtagattatgccgcagaacgttatatcactgttgttcctgagattgaccttccgggacacatgctggctgcccttgccgcttatccggaattgggttgtaccggtggaccgtatgaagtttggagacaatggggagtagccgatgatgtactttgtgccggcaacgatcaggttctgaaattcctggaagatgtatatggcgaattgattgaaatcttcccttcagagtatatccatgtaggtggtgacgaatgtccgaaggtaagatgggagaaatgtccgaaatgtcaggcacgtatcaaagcgttgggcttgaaatcggataagaatcatagtaaggaagaacgtttgcagagtttcgttatcaatcatatagagaagttcctgaacgatcacggacgtcagattatcggttgggatgagattctcgaaggcggacttgctcctaatgcaacagttatgtcatggcgtggcgaaagtggaggtattgaagctgccaagcagaaacatgatgtgatcatgaccccgaacacttatctgtattttgattattatcaggctaaagatactgagaatgaacctttcggtatcggaggttatttgccgatggaaagggtgtacagctatgagccgatgccggcttcccttactccggaagaacagcagtatataaaaggtgtacaggctaatctctggacagaatatattgctactttctctcatgctcaatatatggtcttgcctcgttgggctgctttgtgtgaagtccagtggtcaacacctgataagaagaactacgaagatttcttgtctcgtcttccacgactgattaagtggtatgatgcagaaggatataattatgcaaagcacgtatttgacgtaaaagcagaatttactccgaatccggctgatggtactttagacattacacttactacaattgacaatgcgccaatccactacacgctagatggtacagagccgactagtacttctcccgtttatgatggcgctttgaagattaaggaaaatgcagacttctcggctatagctattcgccctactggaaatagtcgtgtcgtttctgagaaaatcgatttcagtaaatcaagcatgaagccgattgttgctaatcagccggtgaataaacaatatgagttcaaaggtgtctctacgttggtagatggcttgaaaggaaatggtaactataaaaccggacgctggattgcatttagaggaaatgatatggatgtgactattgatctcaaacaaccaacagagatttcaagcgttgccatttctacttgcgtagagaagggagattgggtttttgatacaagaggactctctgtagaagtttcagaagacggcacaaacttcacgaaagtggcatctgaagcttatcctgcaatgaaggaaactgataaaaatggtgtttatgaccataaactaacatttacacctgtaactgcacaatatgtgaaagttatagcttcacccgagaaaagtattccggaatggcatggtggtaagagttatccaggctttttatttgtagacgaaatcacaattaattaatgaatataagaaagagatacactaaagtttgtcttttcttatgggtaatcgggatgtgtctttgtgcacatcccattaatgcacagtccgtaattcctgttcccttaaagatggaacagggtacgggctcttttttactctctgaaaaaacaaagctttatacaaacttacaaggagaagaagctattcttctgggcgactatctgaaaactgcattacctgtacaatttaaggaagggaaaaagaaagataaacagaatgtcttgtctttattgataacagaaaagaatcctcagttggtgtcaccggaaagttatatattatccgttactcctgaacatattctgattcaggcttcttccggtgctgggttgttttatggaattcagacactgttgcaattatctcagccttcgggcacgggttattttatagtttctgttgaagtacaggatacccctcgttttgcttatcgtgggatgatgctggatgtctcccgccacttcttctctaaagaatttgtgaagaaacagatagacgcattggcattttataaactaaaccgtttgcatttgcatttgacggatgcggcaggatggagacttgaaataaagaaatatcctttattgacggaatttgccgcctggcgtactgatgccaactggaagaagtggtggaatggcggacggaaatatctccgttttgatgagcccggtgcttccggtggttattatactcaggatgacatgaaggagattattgcatatgcgcagcagcattatatcacaatcattcctgaaatcgagatgcctgctcattcagaagaagtattggctgcttatccgcaactctcctgttcgggtgaaccttataaaaacgcagatttttgtgttggaaatgaagaaacattcactttcttagaaaatgtgcttactgaagtaatggagctttttccatcggaatatattcatgtaggaggcgatgaggctggtaaggcggcttggaagacttgtccgaaatgtcagaaaaggatgcaggatgaacatctttctaatgtagacgagctacaaagctatctgattcatcgtattgaactgtttctgaatgcacatggacgtaagttgctgggttgggatgaaattcttcaaggtggtctggctcctaatgctactgtaatgtcatggcgtggcgaagagggaggtattgctgctgtccgttccggtcatcaagcaattatgactcccggtcaatattgttatttggatagttatcaggatgctccgtattctcagccggaagccatcggaggatatttgccattggagaaggtttattcatataatccggtttcagattctttaactgtagaacaggcaaaacttgtttatggtgtgcaggcaaatctatgggcagaatatatccccactccggagcatatggaatatatgatatatcctcgtatccttgctttggcagaagtggcttggtcggctcccgaacgtaaatcatggacagactttcataatcgtgcattgaaagcagttgatgatttgcaagcgaaaggatatcatacttttgatcttaaaaatgagataggaagtcgtccggagtctttgaagccgataagtcatttggctgtggggaaaaaggtgatttataatgctccgtatagtcctcactatcctgcgcagggaaatacagctcttactgatggtattcgtggcgactggacttatggagatggatcctggcaaggttttatcgataaaaagcgattggatgttaccattgatatgggtacggaaactgctgtccattctgtctctgctgattttatgcaagtggtaggggcagaggtctttttgcctgaatctgtcactatttccatttctgatgatggagcaaacttcacagaattgaaacaatatacttttgaagtaaatagaaaagaagctattaaatttattagtatttcatgggaaggcagtgctgaaggacggtatatacgttatcaggctcgtgccggagaagagtttggcggatggatatttacagatgaaatagtagtgaaataatcagatgtataatttatgactataaatattagatacttattaggaatagccctccttttttctttctctgtgatcagtgcacaagtacgaacctcgtatacttttgagaaagggtggaagtttacacgtgaagataatgctgattttattcagcctgactataatgatatcaagtggcaatctgtggtagtaccccatgactgggctatttatggaccttttggtatagataatgacaggcaattgacagccattgcgcaagacggacaaaaagaagcgatggaacatgccggacgtacaggtggtcttcctttcgtcggagtgggttggtatcggctgaattttgatgctccctcttttgtcaaagggaaaaaggctacattgatttttgacggagctatgagccatgctcgtgtgtatattaacggtcaggaggctggttattggccttatggatacaataccttttatctggatgtaactccctatctgaaagaggggacaaagaatactttagctgttcgtttggagaatgagacagaatcttcccgttggtatccgggagccggactttacagaaatgtacatctggtagtaacggaagatgctcatattccgacatggggtacacagttaactactccggtagtgaaggatgattatgcgaaagtgaatataaaaacgactttggtcgtaccttctggaaaacagtttgatgcataccgtatagtgactgaacttaaagataaggatggaaaagtagtaactactgatgaaaaacaaggttcccgttttgatgataatatcttcagccaggaacttgttgttagtcgtccggctttatggagcccggaaactcctgttctttatcaggctgtctctaaagtctatgaaggcaatatactgaaggatgaatatacaacatctttcggtattcgtactattgaggtcattcccaataagggctttttcttaaatggaaagagaacttcattcaaaggcgtatgcaatcatcatgatctcggccccttgggaggcgctgtgaatgatgctgctattcgtcgtcagattcgtattttgaaagatatgggttgtaatgcgattcgtacttctcataatatgcctgctcctgagttaatcagagcttgtgatgagatgggaatgatggtgatggcggaatcgtttgatgaatggaaggctatgaaggttaagaacggctatcgtcatgtttttgacgaatgggcagtaaaggatttgacgaacttgctacgtcattatcgtaataatccgagtgtggtgatgtggtgcatcggaaatgaggttcccgaacaatgggatggaaataaaggacctaagatgtcttattttctacaggaactttgtcatcgtgaagatccgacacgtcctgtcacacaggggatggatgcgccggatgctgtagtcaataataatatggcggcagtaatggatattgcgggatttaattataggccacataaatatcaggagaattataaaaaacttcctcaacagatagtcttgggtagtgagactgcttctacggttagttcgcgtggagtatataaattccctgttacccggcaatggatgaagaaatatgacgatcatcagtcttcctcttatgatgtggagtcttgttcatggtccaatctgcctgaggatgattttattcagcatgaggacttaccttattgcataggagagtttgtttggacaggattcgattatctgggtgaaccgactccctattatacagattggcccagtcattcttcactatttggaattatcgatttagcagggctgcccaaagaccgttattatctctatcgtagtcactggaataaagaacaggaaacacttcacattcttcctcactggaattgggaaggacgagagggagagataactcctgtctttgtatataccaactatccttcagccgaattattcatcaacggaaagagccaagggaaacgtaccaaagacctttccgtaaccattgataatagtgctgactctgtttccatcatgaacttgaaacgtcagagccgttaccgcctaatgtggatggatacaaaatatgagccaggcacggtgaaagtcgtggcttataatgctgacgggaaagctgtagctgaaaaagaactccatacagccggtaaaccggatcatattgaattggtagctgatcgtaatgtaatcaaggcggatggaaaagatctatcttttgtgacagtgcgagtggtagatagagacggtaatttgtgtccggatgcctcacatgaaatcagtttcaaagtgaagggagagggtagttaccgtgcaggagctaatggtaatgcagcttccttggaatctttccagcgtccgaagatgaaagtcttcagtggtatgatgactgctattgtatcttcgacagagcagccaggcaaaataacccttgaagctacgggtaaaggcttgaaaaaaggagtcttaatcattgaaagccgtcaggaagctaagaagtaagaaatatcgttgtaatatgtgtaattcctctaagtgtttcattgcgatacacttagaggaatttttgtttaagcaggcaggagtttaacatctttgcaggcaaaataaaagctgtaaaagtatgttcttttattaaattgtattacttttgcatcgttttagtactgtattcgtttctctatgaaccttggttcttatatggagataagataaaaaggctaaatccttaagagatgcgctactgcttcataaatggatttcatttgtgaaagtcagggcgcttttgtcttttaagtaagtgatgaaataaaaaacaaggggtaatgggtgataatgaatgatttggacaaagaacgacaaacagagggaaggaaggcatggtatgctgtacaaaccttctattgtaaagaagaacatttggggaaatatttggaaaaaaaaggggtaaattattttattccgatgcgatatatcgagcatgagacgcttgatggtaaaaagcatcggaaactgactccagctgtacacaatctgctgtttatcgagaaagaatttacggaaaaagaactattagaaagggtaaaagattgtactataccttttttgcttgttcgtgaccggagtacacggcggtgttatgagattccagactgtgagatgttggaattccgtgccgtatgcgatcctaattataaaggaactctttatgtcgatacagtaacagcagaagcccgtcccggacaagcagttcgggtgatccgtggcccgtttgccggacttgaaggcaaactcacgcaatacaagaagagctattacgtagttgttacgttagctactatcggcgtcatgctacatattcccaagtggtattgcgaaaaaatcaactaatcataacattacgatcatctgctcaacaccttgttgtcggacacttcatgtctgacctttagaactgtttttttaatctcggaaggtaatctatttatttaataaaatattcaattttttgagtggaaggatatataccctgccactcaaatcttgagtactaataacaaatcaatgaaaggaattgttttagctggtggctcaggtactcgtttgtatccgatcacaaaaggagtgagcaaacaactgctccctatctttgacaagccaatgatttattatcctatttcggtattgatgttggctggtatacgtgagattctgataatttcgactccttatgatcttccgggctttaaacgtcttttaggagatggctcagattatggtgtacattttgaatatgcagagcaaccttctccggatggattagcccaagcatttattatcggagaagaatttatcggtaacgattctgcttgtctggtactaggtgataatattttctacggtcagggtttcacccgtatgctgcaagaagctgtgcatactgcaaaagaagagaataaggctactgttttcggatactgggttgccgatcctgaacgttatggtgttgctgaatttgataaaatggggaatgttctgagcatagaagaaaaacctgttcagccaaaatctaattatgcagtagtcggtctttatttctatccgaataaagtggtggaagtagctaaaaatatcacgccgtcattgcgtggtgaattagagattacgacagtgaatcagcaattcctgaatgatcaggaacttaaagtgcagctgctaggtcgtggattcgcttggctggatacaggaactcatgattctttatccgaagccagtacttttattgaagttattgagaaacgtcaagggttgaaggtagcatgcttggaaggtattgccttacgtcatggatggattactactgataaaatgcgcgaactggcccagcctatgctaaagaatcagtatggacaatatttgttaaaggtaattgatgagttaacacagaaataaacttaatacttaattttcaaaataatcacagtggaagttattaaaacagctatagaaggtgtgttcattattgaacctcgtttgtttaaggatgatcgtggctatttcttcgaatctttctcgcaacgggaatttaatgagaaaattcgtaaagtgaattttgtacaagataatgagagtaagtctggttatggggtgctacgaggtttacattttcagatgcctccttatgcacaaagtaaattagttcgtgttattaaaggtgctgttttggatgttgcggtagatattcgcaaaggctcaccaacgtttggaaagtatgtatctgtagaactgacagaagataatcatcgtcaattttttattcctcgtggttttgctcatggattcagtgtgctgacggatgaagttatttttcaatataaatgtgataatttctatgctccgcaaagtgaaggggctttggcatgggatgatcctgatttgggtattgattggagagttccggcaaatgagattgttttgtctgagaaggataatcatcatgaattattgaaagatgcttcttggttgtttaactataatgaaagtctatattaaataatgaatattctagtaactggagctaatgggcagcttggtaatgaaatgcgatgcatagcagctacaagtttgaataattatatatttactgatgttgcagagttggatattacagatttagatgctattcgtaatatgatacatttggataatataaaggtaattgttaactgtgctgcttatacgaatgtagataaagcagaagatgattatgatatggcagacttattgaataataaagctgtagagaatttggctattgctgcaaaagaagttaatgctactttaattcatatttcgactgattatgtatttcaaggtgataagaatatgccatgtggagaagactgtgaaactaatcctttaggtatttatggtaaaacaaaaagagcaggagaacaaagcatccaacgtgtgggctgtaattatttgatttttcgtacagcttggctgtattctcaatttggtaagaattttgttaagactatgcgacagttaaccgctgataaagataaattgagagttgtttttgatcagattggtacacctacatatgcaaaagatttggctgatattatttatagagtgattgagggggatcaatatcacaaacaaggtatctatcatttcagtaatgagggtgtttgttcatggtatgattttgctaaagaaatctgtgaattgagtggaaatagttgtgatattcaaccttgccatagtgatgaatttcctagtaaagtaaaacgtcctcatttctcagtattagataaaacaaaattgaagctggcttttggtgtagagattccttattggaaagattctcttgtgaaatgtattaatgaacttaaagaaaataattaatcatgaaattctcaagaaatataatgatcactggtggtgctggtttcattggtagtcatgttgtccgtctgtttgtgaataaatatcccagctatcgtattatcaatttggataaattgacttatgctggaaacttagctaatctgaaagatattgaagataagcctaattatgtttttgtaaaggctgatatctgtgattttgaaaaaatgatagagttgtttagtgagtataagatagatggggttattcacttggcagctgaaagtcatgtagatcgtagtattaatgatccttttacttttgctcgtacgaatgtaatgggaaccctttctctgcttcaagcggctaaattaacttgggagtctctttctgaaggttatgaaggcaagcgtttttatcatatatctacagatgaagtttatggtgcattggatttaacgaatcctagtggcaataaggacggtaggggaccttatggtcatgatttttttaaggaaaccacgaggtatagtccacacagtccgtattctgcttctaaagcaagtagtgatcattttgtacgtgcttttcacgacacttataatatgcctacaattgtaacgaattgttccaataattatggcccttaccaatttcctgaaaaacttataccattattcatcaataatattcgctgtcgtaaaccattgcccgtgtatggcaaaggagaaaatgttcgtgattggttgtatgtaatcgaccatgttcggggcattgatcttatttttcacaaaggtaaaatagcagagacatataatattggtgggttcaatgaatggaagaacatagatattattaaggttcttattaaaactgttgataggttactaggttatcccgaaggttattccttagatttaattacatatgtttctgatcgaaaggggcacgatctacgctatgcaattgactccgctaagctgaaacaagagttaggctgggagccgagtttgcagtttgaagaaggtctcgaaaggactgtgagatggtatttagataatgaggtatggatggacaatgtgacaagtggtgattatcaggagtattacgattccatatataggaatgaatgaatattctcttttatatagagcctttttattcacataataattaaagtactaatatgaaaaatagcttttgatgttgtaaacatctaaagttggagttggatacgaagttccggatatttactgaataattgttttatatttgataactactaattacaataataagcgaatagctaagaatacttttcttctctatttccgtatgttatttaccatgatggtatcattgtatactagccgtgtggtactagctacgttgggggttgaagattttggtatttataatgtggtagggggagtagtaactatgtttgctattatatctacctcattgtcttctgccattagtcgctttataactattgagttgggcaaaggtgatctacgaagactgaagacggtattttctacagcagtagttatacagtttttaatggctttagtggtcgttatacttgctgagcttataggagtgtggtttcttaataataaaatgaatatacccgaagttcgtatgaatgcggcaaattgggtgcttcagttctcaatttttacctttggagtcaatttgatttgtattccctttaatgctttaattattgcacacgaacgaatgtctgcatttgcttatgttagtattctggaggtgtcacttaaactcttaattgtttatttattagtattaatgtcagtagataaattgattgtttatggggctttgttgttggtggtagcaattgttataacctttgcttattttatatattgtaggcgacattttaaggaatgtaaatgtttttgtcgaatcgatagattcctattgaaaagaatgttgagcttttcgggttggaattttataggggcatcttcagcaatccttagagatcaaggcgtaaatattgctataaatcttttttgtggtccaactgtcaatgctgcaagagggatggctgtacaggttaatcatgcaattaatagtttcgctcaaaactttatgacagcattaaatccacagataacaaaatcatttgctgtaggtgatagtaaatacatgtttactttgatttttcagggggcaagattatctttttatatgttactatttttgtcattaccagtactcatgagtacagaatatatattatcaatatggttaaaaattgttcctgattatacaatcatatttgtccgtttagtcttgatctttgccatgtgtgaatcaatatcaaatcctttgattactgcgatgctggcaacaggcagtattagaaattaccaaatagttgtaggcggtatgcaaatgatgaattttcctatttcatatatattgttagaacgaggttatgcaccagaaattactctttatgtggctattggtatatcattatgttgtttggcacttcgtttatttatgcttcgtagtatgatacaattgcctgttaaaagctatatgaagaatgttttctttaatatatgtgctgtgacgatattttcagttgcaattctctatttaatctcattacgattacaatcatcattttattcgttcttgatcttatctttctcatgtatcatatgctcatttatggctatcttttttgtgggttgcaaagcaagtgaaagagtatttgtcgttgatcaagtgcgtaagcttataaaaaataacttgtaatcatatcaaataagctgttgaggatcatgataaaaataaaaaaatcagaggattgttgtggatgttctgcatgcttgtcaatctgcaatcataatgcgatagtttttaaggaagatgtggaaggttttaaatatcctatgattgaggaaggtaaatgcatcaattgtggactttgtgagatggcttgtcctattctttatagaaaggtgaaggatataaggccaactccaaaagcatattttgcagctcgccataaaaatattgtaacgttacggaacagttctagtggtggtgcttttacagctattgcaggatctgtaatagaattgggaggggttgtttgtggtgtagaatatgataacgatggagtagtgagacatagcttttcggaaacgatggaaggtataaggagttttatggggtcaaaatatgtccagagtgaaattcaaggtgtttacaatcagataaagacttatttaaaaagcgatcgctgggttttgtttacaggttctccttgtcaagtagaagggcttaagctttttttacgtaaaccatatgagaatttactaacggttgatttagtttgccatgctgttcctagtccacttatatataagcaatatataaatatgtgttcgacgaaacttggccaaaaggtcatgtctatcaacatgaggtacaaacaaacttatgggtggagtcatcgcttctcttattgtttttattttgaaaacggccagaaagctgtcgatcctgtttgggtagttaattggggaaaaatatttttttctcaaatgataaatcgtccttcttgtcactcttgtaagtattctaacttggaccgtcctggagattttacaatagctgatttttgggacgacaagaagaatcgcccggatttgtattcatgtgaaggtacttcattattaatggtgaatactaatatggggttagacttgataaacaaactttacgattctattgatttgtggaagataacgaaagatgaagctatgcagccatgcttaattcgccctacatgttctaatcaaagacgacaagagttttgggaattttatcttttaagagggtttgatgctgcatataagaagtattttggtgatagcaaatatgttatcactaaaaaaatagtgaaacaaattattaaaagagtattaagaaaactccaataatagccaagctatttatgggtgaacaaaaaatcaaataaatgtcagaattacaaatattgatatttaacgctgctgtcttttctatattagcagtttaccactattggaaaaataggaagttaaatatcgctttctatatattggcatattattcgatttgtgcatggggagcattactgtatcatgagcacgagttgtttcattatatgcgggggagggagacgtattcaattataccatttttatatcttatacctgttatttttctttttgcatatcctattatcagatatgataatactagaatcactcgaattgaaacgttaaattctaacttcttcataaatttggtttggatacttctttttattcagatagtgttatatattattttatttccttcatttttaaaagcaatactttcttcaaatattggtgattatcgtaatgatacatatgatgaatctgagattgtacaatttccaaattatttttttaacatattatgtcgtctatatatgggcgcacgcaatgttgttattttgattgccgcttacggtttacttgtcataaaaacacatagaaaacttcttaagatatttctcgtcacttctttatgttttcctgtatatatgtttacagcatatgcaagtagagccgtaatgataatgacatttttctttttagtttttatttttgtgtttctatctgtttttatgaatgtaggattgaaaaaaaagattgtatcttatttaatcttaatcttagttcctatttcttcagcctttattcttatatccaactctcgttttggtaatcttgccacttatatgttttatcggtatttaggagagtcttttaataattataatacacattttttctatgagttaaaaggtaatacatggggagaggcatattttgttttttttcgtaagcttatgggaatttcctcaaattttaaaacaacacgtgaaaaatgggagtggcttgataatattacaggtgttgacacccatgtattctatacatttgtaggcggtctgaatattgagtttggttttgttggcactattgttattggtttgcttttatcgttttttatggtaaagaaaatgcgaccttacaatgtactgacactgcctaagttcatagctttgggaatgttagcctacacactgatcaatggtgtttttttctttgttcttcaaggggattgggggaatcttgaaattttgtttactctttttttctgctttttatttagtaagtatcggacaagaaaatatattaataaataatgaagatcggaattctaacatttgctaatgtccctaattttggggctaatttacaagcactatctacgataagctatctacagaatcacggatataatcctattttgattaagtgggagccagaagattttgaagctcgtttcacaagtattaaaactcagaagcaaccacaagagcattttcattttgtagagaaatatcttccgcagaccaaaatatgtcgtaatgatgatgatatttgtcaagtgataaaggatgaaaaaatagaaggtataattattggcagtgatgcagttcttcagtgttcgtctttttggggtagattggattttccaaccaaaacagttgtacgtgttaataaaactacatctgaacgtgagtatcctaatgctttttggggtacattttatgataaacttgggtctaaaattccaatggtgattatgtctgcatcatcacagaatgcgaaatatagattgatagcgcgttcggtaaagcataaaatgagtaataatttgtctcacttcgaatatatttcggttcgagatatatggactcgtgatatgattacttatataacaaaaggggcaataataccaaatataactcccgatccagtatttgcctttaattataattgtgctaaattcattccttcaaaagaagatattcttttaaaatatcatttgcctgaaaattatgttcttgtaagcatgaaatgtagaatgcttgataatatgctatggatggataaattaaaatcagaaatgaaaaagctatatttagaatgtgttgctcttcctatgccgactggtattgggtttaagcataattttgatttttctattactactccgctacctccattagattggtatgccttgataaaatatgctaaaggatatattggggaaaatatgcatcctattgttgtggctctacataatgcagtaccatgtttttgttttgatacctatggtgtacttaaatatgcacgttgtgtatgtgtcgaagaatcgagtaaaatttatgatattatgtcacgtttttctttacttgataatcgtatcaatgcgtattctcgcttttggaaatgtccacctgttgatattgtgattaatcgaatattacattttgatgtaatagcatgtcaaaaaacagctttgaattattataataactatgagcaaatgatgagttctattttggaagtttttaagtctaaataatgttttatgaaatatcttattacattgccatggatgccttatcctgctacagacggaggaaagcaggggtcgtttaatatgttaatggagttgcagaatatgatagatataactttgatctatcctgtattctttaagaaacaaatggcctgtcaatatttgttggaaaaacaattaccaaaggttaaagtttacccttttgaatattataaaaataaagatggcatcaagtcgcaatactcattatttcgtctgcaccgtattataacccggaaatttttgaaacagccatatttggctacacctatatataaagatgcttatattgattttgtaaatgaaattataaaaaaagagcggattgatattgttcaaaatgaatattttgaacagctatatatggtttatgctattcctaatactgtaaagaaggtgttcattcaacatgaaattcaatacattgctaaggaacgtctgattcagcagcgtgaatatccttctagcgtacgctatttagccacgatgcaacggatacaggaaattaatgcgttaaatgaatacgaccaagtaataacaatgactgatattgataagaatatcctgatgtgtgatggggtaagagcacctatttcagcttctccttcctttattcctttacctgataatatagcatataaggaatgtgaacggagtagtatctgttttattggtggttctggtcataatccaaacttgaatggagttacttggttcttagataatgtttggtctttgatactcaaagaaaatcccaattttacttttaaaattataggaaaatgggatgagaaaattaaaacagaatatcagaagaagtatagaaatttgtttttttgtggctttgtagataacttggctatggttatatctgaatgtattatggtaatacctattttaataggtagcggtattcgtatgaaaatattagaatcggtcaatttctattcgcctttcgttactaccacagtaggtgtagaaggacttgattttataaatggaaaagagtgtatcatagctgatgagcctcaagcttttgctactggtgttttaaaaatagcaacagataaggttttacaacataatctgacaaaagctgctcatgagaaactaatggagatgtattcaccggaagcttctgtacagcggcgcctgaatatttataatgaaatgttgaaacgataatgagattatgaatttatcggttgttctgtttatactaatagttgtatttattaagtattggttactgctatttacttctcctttactaatggcttattgttggctgcatcgtcgcaaaaacatggctaatcctgaaggtgaggtgagtgaaattagggattctggcattacttcttcttcttgttctaaaaaaatgttcaaacgaatagataaaagaggattgatcaatattgtggatggttattttcgttggatgatcaaaataatttcggatattccttcacatcatatacgtgatttcttttacaagtatattttcttggtaaaaatggaaaagaattcagtattatattatggaagtgaaattcgtgcaccatggatgttgatgataggaaaaggttctgtcgttggagataatagtattctggatgcgaggcgtggaggaatctatatcggtgaaaacgttaatattgcttctaatgtttctctttggacaggtggtcatgattataatgatccatactttcgatctatgaaaacgaatcgtggtcctatttatataaagaaccgtgtatggattggccctaatgtaacaattttgcatagtgttactattggggagggagcagtgatagcagctggtgccgtagttactaaggatattccgccttttactatatgtggaggaataccagcaaaagttttggcgcaacgttctattgatttgcggtatactttgggagggacatatcttcattttctataaagttgattaatgaaaaaattagcaattgtaatacctgcctataaggtagacttctttgagactgtattattctctttagcgcaacagacatgtaaagatttcactgtttatattggtgaggattgtagtagagatgattttaagagtcttatagaacaatattcgaagcaattggatattgtttatagaagatttgaagtgaattttggtgggcatgatctcgttgcacaatggaaccgttgtatacaactgacacagaatgagccttggctgtggctgttttctgatgatgatattatggggcctcgttgtgtagaatatttttttaatacaatagcaatagataatggagcttttgacatttatcattttgatgtaaagattgttgattgcgaaaatcagatagtgagaattccaactgtttatccatcggtgatagatagtgagactttttatcgtcggaaagcgtcggctcggttagatagttttgtagtagagtatatttttctaagggatatttataattgtacaggtggttttcagcactttgatttagcatggggaagtgatatagctacatgggtgaaaataggagctgataaaggtattaaaactatttctggagattatgtatattggcgtaagagcaaaaaaaatataacacctaatatggataataaaatggtgctccggaagcttactgctgatattgagtttactcattggataaatgagttctttcataaatcatctgtctaccgatttacaaagtatgctttttttcgtttagtggtacattattctcaagcaatctcaaaatctcaaatacgcctcttattagataaggcggttggaaaaaatattatttccttcaatgatgcatttatcattaattggacatatcgtttcattcagctagctaaaagagtaaaggatgttctatatttttgactatatgaataatttatatatttcaataaaatgattgtaagaagtaaagcgccattacgtctgggattggctggtggtggaagtgatgtatcaccttatagtgatatttatggagggttgattctcaatgcaacaattaatttatatgcttattgtactattgaagagaccaacagcggtaggattgagattaatgcttatgatgcacaatgttgcaaaagttacctttctatgtctcaattagagattgatggagaagcaagtctcataaaaggtgtgtataaccgtattattcgtgattataggcttgagcctaagtcattcaaaataacaacttataatgatgcgcctgctggatcaggattaggaacatcctctactatggttgtttgtatattaaaggcttttattgagtggttgtcacttcctttaggagattacgagacgtcgcgtctagcttatgaaattgaacgtaaggatttgggattgagtggtggtaagcaagatcaatatgcagcagcttttgggggattcaattatatggaattcttgcaaaatgatttggtgattgttaatccgctaaaaatgaaacgttggattgtggatgaattagagtcaagtatggttctatattttacaggtcgttctcgttcttctgctgctattattaatgagcagaagaaaaatacgagcgaaggtaatcaaaccgctatagaggcgatgcataagattaaacagagtgctattgatactaaattagccttgttgaagggggatgttggggagtttgctcgtattttgggtgaaggatgggaaaataagaagaagatggctggcgccattactaatccgatgattcaagaagcttttgatgtagccactggtgccggtgctatggccggtaaggttagtggagcaggtgggggaggatttatcatgtttgtggttgagccgacacgtaaagaagaagtggtacgggctttaaataatttgaatggttttgttatgccatttcagtttattgatgacggtgcacacggatggaagatttattcaacagataaagttcagaaatagatatagcataagtatggaaagtattgatattgtaagaaaacaagtagcggagagtgagcgagtgaaagcggaactttctaaaaatgaagaagtgatagcggctattgctaaagcggctgacgtatgtactgaggcctatcgtcgaggaaataaaacgatgtttgcgggtaatggggggagtgcagctgatgctcagcatttagtcggcgaatttgtgagtaagttttattttgatcgtccgggaattccttcaatagctttaactacggataccagcgttattacagctattggtaatgattatggatatgataaaatatttacacgccaactccaggcacaaggtgtggcaggagatgtttttattggtatttctacttcaggtaattcgaaaaatattgtagatgccttgcctatatgtaaagaaaaggggattacaacgattgctcttacaggtatgaagtcttgtaaaatggatgattttgatattgtcatcaaagttcctagtgctgaaacccctcgtatacaggaatgtcaaacattaataggacatattatttgctgtattgtggaagagaatattttcggggaagaatataataaataattttatggaagttatcatattagctggtggatttgggactcgtttgcgtagtgtagtaaatgaagtacccaagtgtatggcgccaatagcaaacaaaccttttttgtggtatttactgaaatatcttacaaaatttgatgtatcaaaagtaattctatctttgggttatttacgcggtgttattattgattggattgatgagtgtaaagatgagtttccttttgctttcgaatatgccgtggaggacgaaccattagggacaggtggaggaataaaactagccttaaagagaactagtaaacctaatattattgttttgaatggcgatacattctttgatgtaaatttgaatgaattatatgaatggcattgtttatatccttcatcaatcacactggcattaaagccaatggaaaactttgaccgttacggaaatgtacagatatgtgaagatactaatcagattagaagatttgatgagaaaaaatattgcgagaaaggcttgattaatggtggtatatatattatcaatacattagaaccgatattcgacagactaccgcagagattttcttttgagacaggagttcttcaaccccaatgtttattaggaaaactttatggtgtggtgcaaaatggatattttattgatattggtattcccgaagattacgacaaggccaatgcggaattttcagatctccttttctaaataattctttctataatgagactacaagatattgatgtaactggttttgaaacattgttgctagatcgtgatggagtggttaacagacttcgtccagatgactatgtgaaaaaatgggaagagtttgaatttcttcctggagtacttgaaattttgaaagcttggaatacccattttaaatatatatttatagtgactaatcagcgtggagtagggaaggaaattatgagtgaagaggatttaaaacatatacatgggcgaatgatttctgaagttaagaactatggagggagaatagatagaatttattattgtaccgctttgacggattctgatattaaccgtaaaccgggaataggtatgtttcttcaaatattgagagattatccagatattgataaagctaagtgccttatgataggtgatagtgatagtgatataaaatttgctaagaattgtggtattgtaggaattaaagttatatgaaagagaaaattttgtttttgacagcatatgttcccaataaggcagcagcaggtgaaaaaaacactatgataatgctgaatgatttagcttcatgttatgatgttgatttgatttattttaaatatgattgggaaaatgattatgtgcccgaaagaggaaatgtaaatacgaaactaacaattcgtaactcgataatgactaaattaaaaaatgtttgcaactttccttttgttcatcctactttttctatacgttttaattggctgatacttcgaagagttagggatttgcttaaaatgaatcattataaagttgtgatttttaatcatagtaatatgttcttgtatggacgatatattgataaacgtattcctaaaatattactttgccatgatgtaattgcacaacgtgtgcttcgttcttcttcatatttaatgcagaagatatgtattttctcggaacggatgtccttgaatctgcctaatgctcatattttttctttttcacaaaaagattgtgacctaataaaacagatttatcataaggaaactaatctttgtttagactatattgatgaacaaattattaataaaagtcccgataaagttgaggattatttcacaatgtttggcgattggcggcgtaaagaaaatgcggaaggggctttgtggtttattaatactgtaggtccattattgagaaaaaaagtacatattaaaatcataggacgtggatttcctaataaagatgtgaaaaatatagttccgaatttgaatttagatattcttggctttgtagatgatccatataagattttatctcagagtaaagctttgatatccccattgtttacaggggcaggtattaaagtcaaggttatagaagctttggcatgtggcattcctgttattggaactgatattgcttttgaaggtcttcctcctttatttaattcctttatgctcattgctgagacgccaaaggattatattagatgtatggaatgtctcaatttgaatatagatgaaagaataaaaacgaaagaaatgtttattaagacatatcaatcggattccataacaaactatattaaaaggatttgagtgatttattgttgatatgtgtgagtttattgtttagtctttactgccagatttaatataactacaatcatatagtgaaagtctatatatttagtttaatagatatattatttggaattaatttattcaattttcctttgttaatcctcgataaatatgattgatatttctattattacggtcggtatgaaccatcttttatatcttaaagtattattacgttctttatataaagagaatattcctcaagcaagtattgaaatgatttatgtggataattgttcatcagatggtactgttgaatatatccgacaaaattatcctcaagtaaggatcgttgagaatcaaaaacctttaggatttggagaaaataataataaaggagtattagcctcaatagggaaatatattgctattattaatccggatattgttttgcataaagggagtttagattttctatatgaatatgttgaaaagcatcctattataggcattactgtaccaaaactattgaatccagatgggacagttcaatattctgtgagaagttttattacattaaaagttctgttctctcgatttttatctaaaggtaatgatcaaacaaccagtaagatagtgaataagtatctttgtaaaaacatggatacaacaaagatacaacctgtagattgggctattggcgcagcattatttatgcggagagatttttatgcttttttaggcgggtttgatcagaattattttttatatatggaagatgaagatatttgtcttcgatcttggaaatgtaatcgtcctgtcatttattttcctgaatctataatgactcataaccatcttcgtggaagttctaaaatcggtcgaaaggcgcttcttcatttacagagtatgtttgttttctttaagaaacatggatgttcgattggaagcttttgttctaaaatgcaagcttgctcaaaactagaatattattagaagaataaatgtggttttatagaaataatattaaaatctattatataacatcgttctatgcaggagatccaacgttttaataaagttttaaaatcttgtgtcctttttggggatataattttgttgaattcattgctatggggatttgaactggttttgggcagtcgcttttattctggtaatttaacttctctttatcaagggatggttctgcttagtctatgctatctggtttgcaatattcaatcaggggttattttgcatcatccagttgttcgtccagaacagattatgattcgtgtacttcgtaatatggttccttttattttattttccatttgctttttgtctcttttccattttgaatttttccgctctcggttgttcggattgttttatgttgctttactgatcatcttgatttgttatcgtcttgcttttcgttattttttggagctttatcgtgaaaaaggaggaaatgttcgcatggttgtattggtgggcagtcacgagaatatgcaggaactttaccattcaatgacagatgatccaacttcaggctaccgtgtaatgggatattttgaagattccccatccgattattatccggaagaagttgcatatttgggacagccgaaagaggcgattgagtatttagaaagaaattcaggtaaaattgcacaactctactgtagtcttccttctgtacggagtgcggagattgttccgatcattaattattgcgagaaccacttggtgcgtttttttagtgttcccaatgtccgtaactatttaaagcgcaggatgtattttgatttattaggtaatgtaccagtattatctattcgtcgtgaaccattggaacttcgtgagaatcgtgttttaaaacgattttttgatataatattttcattgatattcttgtgtactattttcccttttgtttatataataatagggattgctattaaaatcagctcgccggggcccattttttttaaacagaaacgtagtggtgaagacggtcgtgaattttggtgttacaaatttcgttctatgcgagtaaatgcacaatgtgatgttcttcaagctacagcaaatgatcctcgtaaaacacgtataggtgagtttattcgtaaaacgagtattgatgaattgcctcagtttattaatgtattgatgggtgatatgtctgttgttggtcctcgcccccatatgctgaaacatacagaggaatatgcccaagtgattaataaatttatggttcgtcattttgtgaagcctggtataactggttgggcgcaagtaacaggctatcgtggagagactaaagaactttggcaaatggaaggacgggttagtcgtgatatttggtatattgagcattggacgtttatgcttgatttgtatattatttataaaacagtatataatgctattcatggagaaaaagaagcgtattaattagtaataaaacaacaaagtataaaagaatagatatctaattcatcacagttatgagaatattgaataaattgatttttgtagtgttactgccttttctgtttacggcctgccagtcctacaagaaagtaccttatttgcaggatacagaagtagtaaatcaaatagaacagaaagagaatttgtatgatgcaaagatcatgcctaaagatttgttgactatcgtagtttcctgtactagtccggagttggctgcaccatttaatttgacagttgccagtccaacaaatttgtctgttactaatattttagctactacacaacctgtgttacaaacttacttggtagataatgaaggaaagattttttttcctgtattgggagagttaaaactaggtggtttgacaaagaaacaggcagaacaaatggttgtagaaaagttgaaaccctatatgaaagaaacgcctatcgttacagtgcgtatggtaaattataaaatctcagtgataggtgaagtcactcgtccgggtacttttactatttctaatgaaaaagtcaatttattggaggcgcttgctatggcaggggatatgacggtgtatggcttgcgggataatgtaaaactgattcgtgaagatgccacaggtaagcaagaaattataactcttgatttgaataaatcagaaacaattctttctccatattattggctacagcaaaatgatgtcgtttatgtaacacctaataaggcaaaagctcgtaactcggatattgggaatagtacgagtctatggttctctgctacatctatcctagtttctcttgccagcttattatttaatatcttaaaataacgttttgaaaaaatgaaagaagaaatagtaaacgaaagacagtgtgaaactgaggacgagaaaatagatattcaacaattactttttaaatatattattcattggccgtggtttgtcggtgccgttttagtttgtcttattggagcttggatatatttgcgtatggccactcctgtttataatatatcggcaacagttttgataaaggatgacaaaaaaggtggcaatacaggaagtatggtaggactggaagaattagggttaagtggcttgattagttcttctcagaatatagataatgaacttgaagttttacgttcaaagactttagtgaaagaagtaatcaatctgttaaacttatatgtatcatatacagatgaagatggatttccttcaaagaatatgtataaaacttctcctgttttagtcagtttgactccgcaagaagctgagaaactaactgatcctatggttgttgagatggcgttgtatggagaaggtggtttggaggtaaatgttacagttggtgataaagaataccaaaagcattttgagaaattgccagctgtattcccgatggatgagggaactttagctttttttcaatcgccagattccttatcattgaagaaagatacaatggaagcgtcttcaaatatacggcatattacggctaagattaaatcacctatgaaagtagcacgggcgtattgtgaaaatctaaaaattgagcctacttctaaaacgacttcggtagctgtgatttcattgaagaactctagtttgcaacgtgggcaagattttatcaatcaattattagaaatgtataaccgtaatacgaataatgataaaaatgagattgctcaaaagactgctgaatttatagatgaacgtatcaatattatttctaaggagcttgggagtacagaggcaaatcttgagaattttaaacgtaatgccggtattaccgacttgactagtgaagcgcaaattgccttgaccggtaacgccgaatatgaaaagaagagagtagagaaccggacacaaatcagccttattgaagatttgcggaaatatataagaggaaatgaatacgaagttcttccgggtaatataggcttgcaagatccaggattggttgcaacgattgaacgatataatgaaatgttagttgaacggaagcgcttattacgtacttctacagaaaataatcctacgattatcaatctggatacaagcatccgtgccatgaagtcgaatgtgcaggcgacccttgacggatcattgaaaggtttattaattacaaaagctgatcttgaacgtgaagcaagccgtttttctcgtcgtattagtgatgctcccggacaagaacgtcagtttgtaagtattgcccgtcaacaggaaatcaaagccggactgtatttgatgcttttacaaaagcgtgaggagaacgccatagcattggcagctactgcaaacaatgcaaagatcattgatgaagctatcgctgatgatatccctgtttctcctaagcgtagaatgatttatctgatcgctttagtattaggtgttggcatccccgtaggcatcatctacctgatcggcctgaccaagttcaaactcgaaggccgtgcagatgtcgagaaactgacaactattcctatcgtcggtgatattccattaaccgacgagaagaacgaaaaagacggttctattgccgtctttgagaatcagaacaacctgatgagcgagaccttccgaaacatccgtaccaaccttcagttcatgcttcagaatgacaagaaagtgattcttgtgacttctaccgtcagtggagaaggaaaatcatttatctccgccaatttagccatcagtctctctttattaggaaagaaagtagtaatcgtagggcttgatatccgcaaaccgggattgaataaagtcttccgtctttcgacgaaagagaaggggattaccttataccttgcaaacccggaaacagatttgatgagtctggtacaaccttcggatattaatcagaatctgtatatacttcccggtggaacggttcctcctaatccgaccgagctgttagcgcgtgatggtctggacaaggcaatagagatattgaagaagagctttgactatgtgattctggataccgcaccggtaggtatggttaccgataccttgttgatcggtcgtgtagcggacttgtccgtctacgtatgccgtgccgactatactcataaagtagagtatacattgatcaacgaacttgccgaagaaaagaaactgcctaacctgtgtactgtaatcaatggcgtagacctgaaacgcaggaagtatggctactactacggctacggtaagtatggcaagtactatggatatgacaaacgctatggctacggatacggttatggacaggaaaaaggtgctaaatcgtaatccggttctaagaataaacctgagaataaacgatagcccgtttcaatctgattgaccacagtatatcccccaagatatagtcagtcagatatagccgaccgcttgattttccccaatcaagcggtttgttgtattcatctacgttgacaatataatttttatatcccatatcaaagaaaagcgggtatccggacaaccagatgcccgctttttttgttatatttgtattatcccttaaaaaatgataattatgaaacaacactacagacttactatttggagccttttctttctgatcacttccagtggaagtgcctttgcccagagaaaaacgatcactccgatagactctctgataacggtaggatatgccaccggaagtttaaaaaccatatccggatcagtggagaaaatcacggagacacagatgaataaagaccagatcacgaatccgctggaagccatacgcggacgagtaccgggtctgaccatccagcgtgggacaaacggtcccgccgccttagatgcagtccgcctgcgaggaaccacctcattgaccagcggaaacgacccgctgattatcgtcgatggagtcttcggcgatttgagtatgcttacctccatttatcctacagacatagagagcttcaccatcctgaaagacgcttccgaaacggcacagtacggattacgaggcgcctccggtgtcatcgaaatcaccaccaagaagggcatgagcggtaaaacgcaagtgagttataacggcatcttcggaatatccaccgtctataagaatctgaaaatgctgtcagcagatgacttccgccgggttgcatccgaacggggcatctccattctggacaagggaaacaacaccgacttccagaaagagatagaacaaacaggattgcagcaaaaccaccacatcgccttctatggaggctcgaatgaatccagctaccgtgtatctctcggtttcatggaccgtcagggagtcatactgaacgaggacatgaagaacttcacctccaatatgaacatgacccaaaagatgttcgacggttttctgaactgcgaactgggcatgttcggttctatccagaagaatcacaatctggtagaccttcagaaaaccttctattctgccgccactttcaatcccacataccccaatcacaaagaccccgattccggttcatgggacggaatcactaccgccagtcagatcacgaatccgttggcatggatggaagtacaggatcatgacgccacctcgcatatcagtactcacgctcgtctgactttcaatctgatggacgaactgaaactggttctcttcggtgcttatacctataacatagtcgaaaattcccaatacctgcccacctccgtctgggcgcacggacaggcatacaaaggcacgaaaaagatggaatccctcctgggtaacatgatgctgacctacaagaaaggctggaagaagcattacttcgacgcgctggcactggcggaactccagaaggagacatacaccggattctataccacagtcaccaacttcaatacagataaattcggctaccacaacctgcaagccggtgctctccgtccgtgggagggaaccaactcgtactacgagcaaccgcatctggcctccttcatgggacgtttcaactacacctatgccgaccgctacagtctgacaatgaccgcccgtaccgacgcctcctccaaattcggcgccaatcacaaatggggattctttccctccgtctccgccgcatgggtgatcagtgaggaaaggttcatgaaacgcctccctgtaattgataatctgaagttccgtataggctacggtctggctggtaatcagagcggtatcgactcctacaccacgctgagccttgtcaaaccgaacggagtgattcccgtaggaaactcggcagccgtctcattgggcgacttgcgaaacacgaatcccgacttgaaatgggaagtgaaacataccttcaatacaggtattgaccttgccatgttcggcaaccgcctgctgctctccgccaattattacaactccaaaacgacggatatgctctacctctacaacgtaagcgtaccgccctttacctacaacactctgctggcgaatatcggctccatgcgcaacagcggtctggagatagccatcggcatcaccccgttgaagactcaggacatggaactgaacatcaatgccaacatcaccttccagcagaacaagttgctttctctgagcggtatgtacaatggcgaactgatttccgcccccgaatacaagagtcttgccagcctcgacggagccggctttcacggaggttataaccacatcgtttatcaagtagtaggccagccgctgggtgtcttctacctgccacgtgccaacggactcgtttccgacggaaacggcggctacacctatgacatagccgatctcaatggcggcggcgtcagcctcgaagatggcgaagaccgctatgtagccgggcaagccgtacccaaaacgattctcggatcgaacctcagtttccgctacaagcgtttcgatatttcagtacagatcaacggtgccttcggacacaaaatatacaacggaacctccctgacctatatgaacatgaatatattccccgactacaatgtgatgcaggaagctcccgcacgcaatatcaaagaccagaccgccaccgactactggctggaaaacggagcgtatgtcaatttcgactacgtgacactcggctggaacgtaccgatagaaaaggtgcagaaactaaagaaatatgtccgctccctgcgactggcatttacagtcaacaaccttgcgacgatttccggctattcaggtctttcgcccatgatcaacagctcgacggtcaactccactttggggctggacgataaacgcggatatccgttagcgcggacttacacgttgggattgagtattaacttttaacggaggaggaaaagataatgaaaaagataaagcgatatttgcagcagcagggatggcatttagagagtaaatctctgcatgatggaaaagcaactctgcttggggggaatttgcttgaggggaagatgaacctgaaaaaaacagttgtctttcttattgtgtgcattaccttcttctcgtgcgacaagtttctggaagagagtcccagagacaaactgccggaagatgaagtctacaacaatatctcggatgtatatctgaatgccgtagcctcactttacacctacatcggcggttatagcgacagtcagggattgcaggggacgggtaggggagtctatgacctgaacaccttcaccaccgacgaagccattatccccacccgtggcggcgattggtacgacggcggcttttggcaaggtctgttcctgcaccaatggggaatagaaaacgatgccatccaagccacttgggaatatctttataaagtggtgatgctgtccaacaaatccctcgaacgaatagacaaattcagtgctacccacgcagacgccgaacttcccgcctatcgtgccgaagtacgcgccatgcgggcgatgtattactattatctgatggatctgttcggacgtgtcccgcttgtacttacctcatccccgtcgatgaaagacgtagtgcagagtgaacggaaaacgatattcgactttgtattcaaagaactgcaagaatccgcccctttgctggctgaagtccacagcaaccagtccggtccgtattacggacgaatcacccgtcctgtagttgttttcctcttggcaaaacttgccttgaatgccgaagtctataccgacaacgactggacggacggccagcgtcccgacggaaagaatctctttttcgaagtagacggcaaccgtctcaatgcctggcagacggttatcgcttactgtgaccaactgcaagaaatgggctatcgtctggaaccggattacaaaaccaactttgccgtattcaatgaaccgtctgttgagaatatcttcaccatcccgatgaacaagaccttgtacaccaaccagatgcaataccttttccgttcccgccattacaatcacgccaaagcctacggactgagcggtgaaaacggaccgagcgctactatcgaagttctggaaaccttcggctatgaaacagcgcaacaggacccgcgtttcgatatctgctattttgccggagtcgtatatgatttaaaaggaaatatagtccgtctggacgatggaaccgttctcgaatatttgccgtggaaagtcgaactggatatctcgaatactccctatgagcagacggcaggagcacgcatgaaaaagtacgaagtagacgaaacggctaccaaggacggtaaactgatggaaaacgacattgtactgttccgttatgcagatgtcctgttgatgaagagcgaagcaaagattcgtaatggggaagacggagatgccgaactgaacgaagtacgtgggcgtgtcaacgcttcctcccgaacggctacattagaaaatatccttgccgaacgacaactcgaactggcttgggaaggttggcgacggcaggatctgattcgcttcggagcgttcacgagagcatacagcagtcgtccgcaacttcctgctgagaataatggatataccaccgtatt

SEQ ID NO: 4577 - DNA, 35768 bp, Unknown
  gut microbiota DNA sequence
aaaaaactacgggaggcagcactttcgccatctcccgtagtttttttataatcctgaatattcttttctcggatcgtagcaaggacatgccttgtgaatcgtagcactcagctgataatgtcccgctatctgcgcctccggatactgatgcttgagaatcgtcaacagatcgagcagagcaaagcgttgtgccgtagttctcgtatccgccggtctgccattttcatccagcccgccttcataacaaatcccgatactatgcctgttaaatccacgcacatgggcaccgattttggagacgggacgacaatgatgaagaactccgtcccgggtgatataaaaatgatagccaatatcacgaaaaccccgttgcaaatgacattctcgaagccgttctacagggaaggaaacattgcagcgcgtagcgctgcaatgaatcaccaacaacttaatctctctcgggagatactcatctttagaactttccatgcggatgtattacagatgagccgtacaggacgttaccccgatagcagaaatgatagacgttgcaattgtcacaatgaactgaagaatattcttccaaacttgctttttcatacaattttaatctttaatagtaaataatgattgattaaacagtcgggtccggagcttcatcgccatcgtcacctgaaccaccgccgggctgatcgcccttaccatcgtccggcaacggttcgtctcccgaatcgggcttaccgtcactcttatacagtgcaaagtccagcgttttacacaacttgcggagatcacttcccggatagaaaagcactttacctttctcgatacacgatgccttgaattccttctccgttgcggtagccgttgccgtcttaagactcatgcggaaattccccagatcgcccatctgaacgatattcccttcatccagtacattgacgatttcgagcagaaactctccgatacaaccttccaactcgccttttgaataagacgaacgttcggtaatacgtttacagacctccttgacggtcactttccgtccgctacgtgccactgcataatacttgggagcttcactaggtttcaacaggttcttgcgagccataacaacataattctgtgccataatttttaatacttaatacttattacttaatatttattacctgtaaccgattacacaacaaagatactacatgggcaagtgcccgtgatgtgcagtgacgcacacagacgcactgataaaaggaaaaaacattgagaagattgtattgaatcttcccaatgtttgcatccgatcattgagaaggttttttcaaacttcccaatgttttcagagagtcttcaaaaggacaaaaggacaaaaggacaaaaatgacagataggactattttatgagatcttctgatactttccatgagatatcttattgattttgacgccaatgaacgattttatcagcctgctgatcttgcggtggctgaaatcgtattttacgccgatctgcattgcatcttcggtagtgaatgtttctggcaactcgccgatgaacttccgtgtactgttcggatctttcaacggatggagctgggaagacggcatggaagacaataatagcctgctatgctcataacagcagagaacgatctggagagaacgatcgaaatctacatcctcacaatagatatccggtgcgccatcattcgcctcgaactggcggatgcgtgcctggatcatgctgatgcgcatcacaagacaggcataccgcttgacaacggcctgaaggtcatcgttaccttccagaaccacttcggcaagcagcttagaaaacgtatgattcagataatcccattgagaacggctgaagtgaaacaatacaggatgattcttgcagaaatgataaagctcgaagacacgatgtgccagcggcttgaaagactcttcgagcgagatactgtcatctcccatgggcttccacttcggaatgctgcggaaagtgtagagcatgatacggctcggaagtcctttttccgaagtctctatcagtgaagccatctgactcggggtgccggtgaggaacatggcaagcatgggaaaacggatataaatgggggttaaaccattgatcttgaaagcggaatcgatattctcatgctcgaatgccttgcggagcatatcgtcaaagttaccgcaatccagatgattggctgtagccagcgtctgcacctcggtatcgaatatgatgcttccttgcggaccgttgtcccgcatttggatctgcatacggctgtagctggtagtggcagggagaaaaagcattttgtaagctggtttttccggctcttcgggacactcttcatgtgcctttttcttataagtacagtccagtttccattgggtgtacttatggttataaattttctgctgaagttcgctattggaaagtatccagtcgtggacttcttccagcagataacgtcctgtttgcgcaatgctcttgttgctcccggcgggggcaatgccgaaactgtagaaatggggagaatactttttgtgattatagatgccgaatgtgccgggcagtacggaactcaatgcggtgaggttggagagaaaggaaagatcctgttcacgatcaccttcctcttcgaggatacattcgttcagcagatcgggcagatatttgtacacgcttttgggaaaacagggcgtttcttttctgaattcttcgccttgccaatacgcttcatctgcttcatagatgttttcggatgggctatatgtcacttttgtcattttgtccttatgaagagaagagcaaagcggagaggcggagacggatggagtagaggtaactttttggtaaccagattgtaggatgctcctgatttcctgtgcgggaaagtcggagtgctcaaaataaaccgtaatcccgcgtaatatgctttcttgcgaatatcttctccggcaagcttcgcaggcgagtttaaacagattggtgtgtcgttgcccggcggtcaatggatttaagaaaatgtaggacgaaaggaacaagttgacttcctcttccgagaagttctcggagttttcgtttgcttttgcaggtagcggaggagaggggaggttttctgctgtcggctggaacggttgtgtttccacagctgcttccagaacgaatgactgatagagactggctacgtatccgtccggtgaataggtgaaatagcacaggcggctttcgtctttacaggcgggatcgctgatgaggccggtcagctggtcgtagtaacggctgaccagtaactgcccttcccggtgacggccttcgatgccttccacataggcgaagattttcacgccgtccgtagggctttccagagcagctacggtatgagggtcggcagcgcaaagacggatgatctccagccgattgggaacgtggtcgtagtcgagtccgataatgtgactgggcaactggaaatttcggatggcatgcgctccgtcgaaggtgccggcaggagtgaagcaggggagctggctttttagtttttgggcggcttcatgatcgccttcctgatgataccgccggatggattggatgatggaagcataaaccggatgaatacacataaagatgacttcgaggaaagacatgattttaggctttttggaatacacattttcgtaaacggaaactttaatttcttcgagtacttgcatttgattttgatgttttatgattgtatatcccactatcgggatagcgggtgcaaaggtaaaggagggggaattagaacttgtttcataggttgaaacagattgaataaccaaatatatatctattttttattaaattttaaacaaagagtaaacatgacaaaagaaaatcatggaccttatgaatttttgggaagtatggtagtgaacctgatgaatatcgacaaatcgatttcgtattcttttctggaagatgagttgcatatctccggaagggatgtgagtgccatgcggcaggggaaggatttacacgtttatcagtacgtgcgtgtcgtcagctgtatcatggatgagatacatctggaaattctgttgaatgcactgctgaaggaattgaagaatgtatttgcagcccattgtgatttagtgatcggtacgattccacatcggctttacggaaacggacagccggcagaatgggtggtagtgatgagatgggacggggtaggggtctgatccttcttgtcatacccggattgctatcttagtcttctaaagtacgtccgcatttttttcatgatcttgatacccaaaactactccgtcaaagatggccatgccggtattgaacgaacgcatgagcgaatccgctttgttggcggcgggtgcaagaggcgagaatatttcgcgggtggtggccgtcatagctcgtttttgagcctgaatttcattcaagagcttctttttgcgttgggtgatctcttctaatgtaattttggcaggtgtttgcgcactcataacttcatttattttgaatcggttaaaaacaagttagcgaggaagtttaccatcggggagatgataagctgtttgcggaaaataatgactaaagccataatcagtatattgatgccggcaatgatagcgaagcttgccataagtccgcctaccagaggttccaatacataagccaaggcaaataacagataaaacagggctaccatgccaaggatgataagtattacaatcatgattaacgttgaaagaagtatggtcagcttctccgtcaactctaacttggtgtattctttttgaagttccagatactttttgaactcaaaaaacaactgttgaaagttctcaatacttttatcgtctgcaaacatggtcgctctgttttagtcctttacttacttattctcctatttctcctttaatttcagctgcgatttcgtcaacgagattttccatttcgttgcggttcagcttgattccttttttacgaagaatttctgcgatcttattacgggtatcttctcccttttcaggagcaaacaaaataccaagggctgcacctacggctgcaccacccagaaaagctgctaatacatttaatcctttcataatttatactgtttaaaatgattatgatacaacaaatataacatttttctccaaaggttgttcgcaaaaacagaaaaaaagtacttcctttttatctttcttgatttcttttatggtttaatcttatttaactagacttttggactaacaaatgagacttaaggcgtacttttgtcattcaatattgtaattcaaaacataatgaaagcgaagattgtttttataaccggagcgagcagcggaatcggcgaaggatgcgcccgtaaatttgctaaggaaggatggaacctgattttgaatgcccgtacagtgtcgaagctggaagaactgaaggctgaactggaaaaagagtatggaatacaggtctgtgtgttgccttttgatgttcgcgaccggaaacaggctgccgccgcactggaagcgttgccggaagaatggaaatcgattgatgtattgattaacaatgccggactggtgatcggagtggacaaagagttcgaaggtagtctggacgagtgggatatcatgatcgatacgaatataagaggtttgctcgccatgacacgtctggtagttccgggcatggtggaacgggggtgcggacacattattaatataggttctatcgccggagatgccgcctatcccggaggcagtgtttactgcgccaccaaagctgctgtgaaggcactttcggacggacttcggatagacttggtggatacgccgctgcgggtgacgaatatcaaaccgggcatggtggaaacaaactttacagtggtccgttaccgtggtgacaagcaggcggctgacaatttttacaagggaatccgcccgctgaccggagacgatattgccgaaacggtatattatgctgcctcggctcctgcgcatattcagattgcagaggtgcttttgatgccgacttatcaggcaacgggcactatttcttataagaagaaggcagaatagacgttttttcgctcattttctttgccggatgataaaatttctattattttgttgcccgaaaactaaatgtgaacgaacaagattattgaattattaattaaatacagaatattggatatgaaaaaattggtcgtattaggaatgggagtatgcatggtgcttgcgtttgcatcttgtaaatccagtgaaagcgcctataaaaaagcttacgaaaaagcaaaacagcaagaattggcagaaccgcaggtggaagctccggtagaagtgactccggtagttgcagctcctgtgacaacacctaaggctacagatacaaccggcgttcgtcaggaaaaggtgacagtcgtttccggtaccgacggattgaaggattacagcgtagtagtaggcagcttcggtgtgaaagcgaatgctgaaggcttgaaagactggttggacggacaaggttacaacgcaacaattgcattcaatgcggaaaaagcaatgtaccgtgtgattgtaagctcattcgctgacaaagcggctgctgtcgatgcacgtgacgcattcaaggctaaatacccgagtcgtacagacttccagggagcttggttgctgtatcgtatttattgatttctttttggtaatatatatcgggatggataacctgttttcccgaaataagaaggcggtaactgggaagttactgcttttttgttacacattgtaaattcgttttttagaaatttttatcattctactaaaagaagttataaatagcaggtgggaaacttttttcgtaaataaagtttttacttttgtcattatgaaacagaaatatgtaatggctgctatcgatgcagcgttgaaagcgggtgaaaaaatcctttctatctatgaagatccgaagtcggattttgaaatagagaggaaggcggataactctcccttaacgatagcagacaggaaagcccacgaggcgattgtggccattttgaatgaaactccttttccggttcttagtgaagaaggaaagcatatggactatgcagtgcggcgaggctgggatactttatggattgtagacccgctggacggaacgaaggagttcatcaagcgtaacggagaatttacggtaaatatagctttggtgcagaacgctgtacctgtaatgggtgttatttacgtgcctgtaaaaaaagaactttattttgcagtggaggggacaggtgcctataagtgttccggcattgtcggtctggaagacgagggagtgaccttacagcagatgattgagaaatcgaaacggatgccattggcggatgcgcgcgaccattttattgctgtcgcttcccgttcacacctgacgcctgaaactgaaacatatattgcagacttaaaaaagaaacacggcaatgtggaactgatatcaagcggaagttctattaaaatctgtctggttgccgaaggaaaggcggatgtctatccgcgttttgctccgacgatggaatgggatacggctgccggacatgcgatagcccgtgccgcagggatggaagtatatcaggcagggaaggaggaacctttgcgatataacaaagaggatctgctgaatccgtggtttatcgttgaagcaaaaagagaacgctaattaatgtttatatgacatttgaaattgtatttgtactattatccttattaggaatgatggctgccctgatcgcggataagatgcggccgggcatggtgctcttttcggtagtggttttatttctgtgcgtcggcattctgactccgaaggaaatgctcgaaggtttcagtaataaaggaatgattaccgtcgccttgttattcctggttagtgaaggtatccgtcagtcgggtacattagggcaagtgatcaagaaactgcttccgcaggggaagacgacggtgtttaaagcgcagctgcgtatcctgccgtctgttgcattcatttctgcctttctgaataatactccggtggtagtcatctttgccccgatcatcaagcattgggcgaaatcggtaaaacttccggccaccaagttcctgattcccctttcttatgtgactatccttggcggtatctgtacgctgatcggcacttctaccaatctggtagtgcatggtatgattctggaagccggctatgaaggcttcaccatgttcgaactgggaaaggtcggcatctttattgccattgccggtatcatatatcttttcattttctccaaacggctcttgcccgatgcacgtccggatacggctgtacccgatgaagaagtggaggaaggagagaagctgcatcgtgtagaagctgtattgggggcccgtttccccggtatcaacaagaaactgagtgatttcaatttccagcgtcactatggtgcggaagtgaaagagatcaaaacacgtaacggtcagcgctatgtcgatcatctggaggatgtagtgctccgtgagggggatacgcttgtggtgatggcggatgatacgtttatcccgacttggggagaatcttcggtattcgtgctgcttactaacggcaatgatccggatacttcgggaaagaagaagcgctggctggcgttgatcttgctggtactgatgattgtcggtgctacggtgggcgaactgccggcaaccaaagagatgtttcccgatatcaagctggatatgtttttctttgtctgcattactactattatcatggcgtggaccaatattttccccgcccgtaagtataccaaatatatttcgtgggatattctgattacgattgcctgcgcgtttgccatcagcaaggctatggtgaactccggtgtggccgattgtgtggcaggatttatcatcggtttgagtgacgattacggaccgcatgtattacttgctatattgtttgtcatcacgaatttgtttacggaactgatcacgaacaatgcggctgcggctctggcattcccgttggcactgtccatctcggcgcagttgggcgtaagtccgacacctttctttgtcgtgatctgtatggctgcgtctgccagcttttccacaccgatcggttatcagactaatttgattgtgcaaggtatcggcaactataagtttacggattttgtccgtatcggtctgccgctcaatatcatcactttcttaatctctgtgatcctgatcccgttgatctggaacttttaataaacatattctataaatggaagaaaaaaatcatatatatccgatttttgaccgcatgatgacgcgggaggacaaagaagaacttctgggacagcatagcgtgatgatctggtttacaggtctgagcggatcaggtaaaagtacgattgcgattgcattggaacgtgaactccataagcgcggactgctttgccgtattctggatggagacaatatccgcagcggtatcaacaataatctgggcttctccgaaactgaccgtgtagagaatatccgtcgtatcgccgaagtatccaagttgtttctggacagcggcatcattacgattgcggcatttatcagtcccaataatgatatccgtgaaatggcagcgaatattatcggaaaagatgatttcctggaagttttcgtaagcaccccgctggaagagtgtgaaaagcgggatgtgaaaggactgtacgccaaagcgcgcaagggagaaattcagaatttcaccggaatttccgcaccgtttgaggtgcccgaacatccggctctggcattggatacttcgaagctgagtctggaagaatcggtcaaccgcctgctggagatggtgttgccgaaaatagaaaagaaataaatgaagaaatttcaaaaaagatggaagaatataaactgagccatttgaaagaactcgaagccgagtcaattcatatcatccgcgaggtggcggcggaatttgagaatccggtgatgctgtacagcatcggaaaagattcttcggtgatggtgcgcttggctgaaaaagcgttttatccgggaaaagttcccttcccgttgatgcatatcgattcgaagtggaagtttaaggaaatgatccagttccgcgacgaatatgccaagaaacatggctggaacctgattgtggaaagtaatatggaagcgtttcatgcaggggtaggacctttcacgcatggaagcaaggtacatacggacctgatgaagactcaggcattgctgcatgcgctggataaatataaatttgacgctgcattcggcggcgcgcgccgggatgaagaaaagtcacgtgccaaggagcgtatcttctctttccgtgataaattccaccagtgggatccgaagaaccagcgtcctgaattgtgggatatctacaacgcccgtgtacacaaaggtgagagtatccgtgtgttcccgatcagcaactggacggagctggatatctggcagtatatccgtctggagaatattccgatcgttccgctgtattatgccaaggaacgtcctgtgatcaatctggatggtaatatcatcatggcggatgacgaccgtctgccggaaaaatatcgtgatcagatcgaaatgaagatggtgcgtttccgtactctgggctgctggccgttgacgggcgcagtagagagcggtgcggctaccatcgaagagatcgtggaagagatgatgacgactaccaagagcgaacgtactacccgtgtgatcgactttgaccaggaaggcagcatggagcagaagaaacgtgaagggtatttttaagcaattaaaaatgaatgattaaaaaaactaaaagttggaaatggataataagctggatataaaggcctttctggataaagacgaacagaaagacttgctgagactgttgactgccggttcggtggatgacggaaaatcgactttgatcggacgtctgttgtttgacagtaagaaactgtacgaagatcagctggatgcattggaacgtgacagtaagcgtgtaggtaatgcaggcgaacatatagactatgctttgttgctcgatggattgaaagcggagcgtgagcaggggattacgattgatgtggcttaccgctacttctctaccaatggccgtaagtttatcattgcggatactccgggacacgaacagtatacacgtaatatgattaccggtggctctacggccaatctggcaattatcttggtagacgcccgtacgggtgtgattacccagacccgtcgtcatactttcctggtatctctgctgggcatcaagcacgtggtgctggcggtcaataagatggacctggtggacttctccgaggaacggttcaacgagattgtatcggaatacaagaaattcgtagaaccgctgggaattccggatgtgaactgtattcctctttctgccttggacggtgacaacgttgtggataagtccgaacgcacaccatggtataaaggaatctctttgctagacttcctcgaaacggttcatatcgataatgatcataacttcacggatttccgtttccctgtgcagtatgtgttgcgcccgaaccttgacttccgtggtttctgcggtaaagtggcatcgggtattgtccgcaagggagatacagtgatggcattgccttccggaaagacttccaaggtgaagagtattgtgacatacgacggcgaactggattacgctttcccgccgcagtcggttacactgacactggaagacgaaatcgacgtatcccgtggtgaaatgctggtgcatccggacaacttgccgatcgttgaccgcaacttcgaagcgatgatggtatggatggatgaagaaccgatggacatcaataaatcgttctttatcaagcagactaccaatttgagccgtacccgcatcgacgcgatcaaatataaagtggatgtcaacacgatggagcatctttccattgacaatggacaactgacaaaggacaatttgccattgcagctcaatcagatcgcccgcgttgtcctgactactgccaaggagcttttcttcgatccttataaaaagaataaatcttgcggttcttttatcctgatcgatccgattacgaataatacctctgccgtaggtatgattatcgaccgggtggaaatgaaagatatggctgccacggatgacatccccgtactggatttgtcgaaactggacatcgccccggaacatcacgccgccatagaaaaagccgtgaaggaactggaacgccaaggactctccataaaagtgattaaataaaatgtagaacgatgggattacttgaatttaataaacttccgattaatacgttggtaggtgccgactggaaaacgtttaaggcaatcactgccggccgtgatattgatgctgcttataaaggcaagtaccggttgacgaaagcggtgtgccgcctgctttctccgttggctgcattgcaggataaacgctacgaaaagttgttggccaatcagccgctggaacatgatccggtattcattctgggacactggcggagtggaactacttttgtacataacgtgttctcctgcgacaagcattttgggtataacacaacttatcagaccgtattcccgcatctgatgatgtggggacagcctttcttcaagaagaatatgagctggctgatgccggacaagcgtccgacggataatatggagctggcagtggatcttccgcaggaggaagagtttgcattgtcgaacatgatgccgtatacctattataatttctggttcctgccgaaatatcaacaggaatatgcggacaagtatctgctgtttgatgatatcacggacaaagaactgaaagtgtttgaagaggtattcacaaaattgatcaagatttctttgtggaataccaagggtacgcaattcctcagcaagaaccctcctcatacgggcagggtgaaagaattggtgaaaatgttcccgaacgccaagtttatctacctgatgcgtaatccgtatacggtatttgaatctacacgcagtttctttacaaatacaatccagcctctgaaactggaggatgtcagcaatgaacaattggaggagaatatcctttctatttatgcaaagctgtatcataagtatgaatcggataagaaattcattccggaaggcaatctgatcgaagtgaagtttgaagactttgaagcggatgcgatgggaatgacggagaatatttataagtcactttctatccccggcttcgccgaagcacaaggagatatcgaaaaatatgttggcggcaagaagggatataagaagaataagtataaatatgacgaccggacgattcgattggtagaggaaaactgggattttgctttgaaacaatggaactataatttataaaagaaaggataagtattgatgattaagaaaatggttcatcgcctgtttctgacaggcttcgttgcatttttttcttccttgtctttgatggcgcagcataaagtggagatggtccccttcggggatatggaccaatgggtggaccgccagataaaagagtcggggattatcggagggaatacgaagaatgtgtatgagattggtccgacgactgtgattaagggagatcaggtgtataagaatatgggtggctcaccgtgggcgacttcgaatgtgatggcgaaagtggcaggtattaccaagacaaatacgtcggtttttccggagaaacggggagacggttactgtgcacgcctggatacgcgtatggaaagtgtgaaggtactggggcttgtcaatataaccgtattggctgccggctctatctttacgggatctgtgcacgaaccgatcaagggtaccaaaaacccgcagaagatgcttcagacggggattccgtttaccaagaagccggttgcccttcagtttgactataaagtgaagatgtccgacagggaaaaacgtatacgtgctaccggtttcagtaaaattacagatgtagcaggcaaggattatccggctgctattttatttttgcagaaacgctgggaggatgccaacggaaatgtttatgccaagcgtatcggaacgttggtgacttattactatcactctaccgactggaagaataatgccacgtatgaaattatgtatggagacattaccagccgtcccgaatataaacctcacatgatgcgtctgcaggtgactgagaactatacagtcaacagcaaaggtgaaagcgtgcctatccacgaagtggcatggggggatgaaaatgatgagccgactcatctgtatctccagttcacatccagtcatggcggagcttacgtcggttcacccggaaattcattgtggattgataatgtaaaactggtatattaattaaggtagcggaaaaaataagggataaccaatgatatagattatcattggttatttttttgcttttatttttctttcaaaaatgttggctataccctttgtaggctatccaacacttttatcatcccatataaatatcacgaagaaatgtttttttacgagtttttttgtgtgtattacaataaatatctatatttgcactaaatttaaagaaaaagggtagagatttatatctctttgtttaagatttagagcctgtagagttgtggttatagcgtaacacaaactgcattatattatttactaaaataaattgagatgaaaaagggtttattgtttattttaatggtaggggcttctgtgtgcctgtctgctcaggaaaaaggaaaaacagaaggtaaagcctacactgtagagactaatcgttttggggccaattggttcattagtggtggcgttggtggtcaaatgtactttggcgacaacgacggtaaagcggatttcggaaaacgcattgctccggcacttgatattgccgtaggtaaatggtttactccgggtatcggattgcgtgtcgcatacaacggtcttcaagctaagggagctgctcctagtgctaatgacttgtatacaaaaggtggcaagtattctaacggttactacaagcagaaatggaacatggctaacttccatggtgatgttctcttcaacctttctaacatgttctgcggttacaacgaggatcgtctttattcattcattccttacgtaggtgcaggtgtggctctttcttggtcagaacctcatcaacaaaacttaggtatcaatgccggtttgatcaaccgcttccgtgtatcggatgcttgggatatcaaccttgaattgcgtggccttttgatgaaggatgcattcggcggaacttctaaagaaggtatggccggtgtaactgtaggtgtaacttacaagttcaaaaaacgcggattcaacgctgttcctactgtaccgatggtaccggaaagccagttggacgacatgagaaacagactgaactctctgaagggtgaaaacgaatctctgaaacgtgacttggttgaagcacgcaacaagaagccggaagtaatcgttaagaaagaaggcggattcgttccacgtctggttgttgtattcaacattggtaagagcaacatcagcaagagagagtacatgaacatcgaagcaatggctaagggtatcaaagctaatccggaaaagacatttactgttacaggatatgctgacaagggtactggttctgctgagtacaacatgaagttaagtaagaagagagctgaagctgtacgtgacctgatggtgaacgaattcggtgtacctgcttctcaactgaaggttgattacaagggtggtgtaggcaatatgttctacgatgacgctaagttgagccgtgttgctatcgtggaagaataatccacagttgaaataatagaataaaagagacgtttcctttcgtgggaagcgtcttttttgtatttttgtaccccatatgagcagaatagtagctatagattatggaaggaagcgcacagggatagctgtgagcgatacgttgcaactgattgcaaacgggttgacaactgtacccacgcatgaacttctgaactttatcggtgagtatgtggcaaaagaaccggtagagcggattattataggattgcccaagcagatgaataatgaagcttcggaaaatatgaagaacatcgaaccctttgttcgttcattgaagaaacgtttcccggaacttcctgtagaatatgtggacgaacgtttcacatctgttctcgcacaccgtacgatgctggaagccggactgaaaaagaaagaccggcaaaacaaagcattggtggatgagataagtgccactattattctgcaaacatatttggagagtaaacgtttttaataataagacagagaataatttaattttttagtagagtataaagtatgattttaccaatttatgtatatggccagcctgttttgagaaaggtggcagaggacataaccccggagtatccgaacctgaaagagctgatcgcgaatatgtttgaaacaatggtgcacgccgatggcgtgggactggctgctccacagatcggcttgcctatccgtgtcgttacgattacattagacccgctttcggaagactatccggaatttaaggattttaataaagcttatatcaatcctcatatcatcgaagtgggtggggaggaagtcagtatggaagaaggctgtctgagtctgcccggcattcatgagtctgtgaaaagaggagataagatccgtgtgaaatacatggacgagaactttgtagagcatgatgaagtggtggaaggctatctggcaagggtgatgcagcatgagttcgaccatctggacggaaagatgtttatcgaccacctttcgccgttgcgcaaacaaatgataagaggaaaattaaatacgatgctgaaaggaaaagcgcgtagttcatataagatgaaacaggtgaaataaagataaaaaacgtttatatccctgttaagtaagcgaaaagcattatttttgtttcgtttacaagcataaaatatcaatgattaaaagaatactaacagttttattgctgttccccacactggtttgtgctcagattaatacggagcgggtgatgactattgcccgcaatgcgctgtattttgaggactacgtgctttctattcagtatttcaaccaggtaattaatgcgaagccatatttgtatgagccttattttttcagggcgctggcaaaggtgaacctggaggattatcaaggagcggaagcggattgtgacgaggctatcaaacggaatccgtttgtagtaggtgcatatcaggttcgtggactggcacggattcgtcagagtaaattcgacggggcgattgaggattatcagaaagcattgcattatgatccggaaaacatcaccttgtggcacaatctgaccttgtctcatattcagaaaaaggattatgacgcagccaaggaggatttggagagcttgctgaaagtttctccgcgctatacacgtgcttatctgatgaggggagaggtttctttgcagcagaaggatacggttgcggcactgaaggactttaatacggctctcgaactggataagtatgatccggacgcatggtcggcaagggctattgtccgcttgcagcagtccaactatgcagaagcggaatcggatctggaccgtgcgattcatctgagcgcgaagaacgcgggtaattatataaaccgtgctttggccagattccatcagaataatctgaggggtgctatgagcgattatgacctggctttggatattgatcccaataactttatcgggcattataaccgtggtttgcttcgtgcccgtgtcggggatgacaaccgtgctatcgaggacttcgattttgtgattcagatggaacctgataatatgatggctatctttaaccgtgcgttgcttcgtgctcagacgggagattaccggggcgctatcaaagactatacgacagttatcaaccagtatccgaacttcctcgcaggatattatcatcgtgcggaagcccgcaagaagatcggcgacaagaagggggccgaacaggatgacttcaaactgttgaaggctcagcttgacaagcagaatggagggacgaacaaagacgttgcccagaatcagaataaagataaagaaaaccagagcggcgagaacggcgacgaaagcgaggaaggaaaaactcgtaagaagtctgacaagaacatgaacaactatcgcaagattgtgattgccgatgattctgaagcggatcaacgctatacaagtgattatcgcggacgcgtacaggataagaatgtgaacataaaactggaaccgatgtttgccttgacttattatgaaaagtcgagcgaagtgaagcgttcggtgaatttccataagtttattgaagacctgaatctgtcgaatgtacttccgaagcgtatccgtattacaaatatggaggccccgctgacggaagaacaggtgaaattccattttgccctgattgatgcgcatacatcggctattgtggacgatgacaagagtgctccgaagcgttttgcccgtgccattgacttttatctggtacaggatttctccagtgcggttgccgacctgactcaggcgatattgctggacggagatttcttcccggcctatttcatgcgtgcactgattcgttgcaaacaactggaatatcagaaggctgaacaggctgccgaagcggatatgccgagtggcgctgctgtcaaggaagtgagtgcggtggattatgaagttgtcagaaaggacctggataaggtgataactctggctccggacttcgtttacgcttattataaccgtgccaatgtggcggctatgctgaaagattacagggctgcgattgtcgattacgataaggcgattcagctgtctccggactttgctgacgcttatttcaaccggggacttacgcatattttcctgggtaataataaggcgggaatctcagatttgagcaaggccggtgaactaggagttgtttctgcttacaacgtgatcaagcgtttcacggatcagacagaataacatttttttgataaaaaatagaaaactcaaaagatttcgttacttttgcgttctcattatgaaaatataacatcatcatattatgataaagataacatttcccgatggctccgttcgtgagtataacgaaggagtgaacggtttacagattgcagaaagtatcagttcgcgcttggcacaggatgtacttgcatgtggcgtgaacggtgagacttatgatttaggacgtcctattaatgaagatgctgatttcgtactttacaaatgggacgatgaagaaggcaaacatgcattttggcacacaagcgcccacttgctggctgaagctttgcaggaactttatccgggtatccagtttggtatcggaccggctatcgaaaacggtttctactatgatgtggatccgggagaagctgtgattaaagaaagtgacctgcctgtcatcgaagcaaagatgcttgaattgtcggcaaagaaagaagcggtagtcagagaaagtatttcgaagacggacgctctgaaaatgtttggcgaccgtggcgaaacgtataaatgtgaattgatctcagaactggaagacggacatattactacctacacccagggtgcgtttactgacctttgccgtggtcctcacttgatgacgactgcgccgatcaaggccatcaagctgacaactgttgccggtgcttactggcgaggtcacgaagaccgtaagatgctgacccgtatctatggtatcacattcccgaaaaagaaaatgctggatgaatatctggtgttgctggaagaagccaagaaacgtgaccaccgtaagatcggtaaggaaatgcagttgttcatgttctctgaaacagtaggtaagggacttccgatgtggttgccgaaaggtactgcactgcgtttgcgtctgcaagagttcttgcgtcgtatccagacccgctatgactatcaggaagtaattactccgcctatcggtaataagttgctgtatgtgacttccggtcactatgcaaaatacggtaaggatgcgttccagccgatccatactccggaagaaggagaggagtatttcctgaaaccgatgaactgtccgcatcactgcgagatatataagaattttccgcgttcatacaaggaccttccgttgcgtattgcagaattcggtacggtttgccgttatgaacaaagtggtgagcttcacggtttaactcgtgtacgcagctttactcaggatgacgcacatattttctgtcgtccggatcaggtgaaagatgagttcctccgtgtgatggatatcatttctatcgtgttccgttcgatgaatttccagaatttcgaggctcagatatcactccgtgataaagtgaaccgtgaaaaatacatcggtagcgatgacaactgggagaaagctgaacaggcgattatcgaggcttgcgaggaaaaaggcctgccggctaagattgagtacggtgaagctgctttctatggtcccaagctcgactttatggtgaaagatgccatcggtcgccgttggcagttgggaaccattcaggtagactataacttgccggaacgttttgaactggaatatatgggctctgacaaccagaagcaccgtccggtgatgattcaccgtgcaccattcggatcaatggaacgttttgtggctgtattgatcgaacacactgccggtaagttcccgttgtggctgactccggatcaggtagctatcctgccgatcagtgaaaagttcaatgagtatgcagagcaagtgaagatgtatctgaaaatgcatgaaatccgtgctattgtggatgatcgtaatgaaaagatcggccgcaagatccgtgataatgaaatgaaacgcattccttatatgttgattgtgggtgaaaaagaagctgaaaatggtgaagtttctgttcgcagacaaggggaaggcgacaaaggaaccatgaaatatgaagaatttgctaaaattttgaacgaagaagttcagaatatgataaataaatggtaactttgcagccgtttcatgataaatatttagtagaacaataaaaaaatcaaactaggaagtaaacgtttttaatgaagaatgacactttaaaagggcaatatagaatcaatgaacagattcgtgccaaagaagtccgcatcgtgggcgacgagattgaaccgaaagtatatcctatctttcaggccttgaaaatggctgaagagaaagagctggatctagttgaaatttcccccaatgctcaacctcctgtttgtcgtattattgattactctaaatttctttatcaattaaagaaacgccagaaggagcagaaagcgaagcaggtaaaagtgaacgtaaaggaaatccgtttcggaccgcagactgacgatcatgattacaactttaagctgaaacatgccagaggattcctggaagacggggataaagtgaaggcatatgtattctttaaggggcgttccatccttttcaaggaacaaggtgaagtgttattgcttcgttttgccaacgatcttgaagattttgcaaaggtggatcagatgccggtacttgaaggtaagcgtatgacaatccagctttctccgaagaaaaaggaaatgcctaaaaagccggcggctcccaaaccggtaactcagggacagaaggctgaaaagccggaagcgggcgaggaagaataaaaaagaatgaatgcgtggcgcgcaggtatagtgcgtcaccattatatatttaataattttaaaaacaagtaagatgccaaagatgaagactaactccggttctaaaaaaaggtttacccttaccggaacaggtaaaatcaaaagaaagcacgcttttcacagtcacattttgactaagaaatcgaaaaagagaaaaagaaatctgtgctactctacaactgttgatacaacaaatgtaagccaggttaaggaactcttagcaatgaagtaatcaaaagcgtacaaagtattattaaagtattaaccgaatgctttagcctgaagttcgttgcgtgaagtaacggcgctaacattcaaaaaaagtaaaactatgccaagatcagtaaatcatgttgcttcaaaagcaagaagaaagaaaattttgaaattaaccagaggttactttggtgcaagaaaaaatgtatggaccgtagccaaaaacacctgggaaaagggtttgacttacgcgttccgtgaccgtagaaataagaaaagaaacttccgcgctctttggatacaacgtatcaacgctgctgcacgtcttgaaggaatgtcttattctaaattgatgggcggtttgcacaaagccggtattgaaataaatcgtaaggttttggctgatttagctatgaatcatccggaagctttcaaagctgtagttgctaaagcaaaagctgcttaagtttcaatagtttaggatttacaaagtgtcagttatcgatccgataactggcacttttcttttgttaggcggagagaaaggatgaaaaaaaatgttagtggacgaacaaattctttctttttcttgctattctcagagaatcttattacatttgtgatagaaaaatattagccgtatcgactggatcgggaaactcttcaaattaatctgatgcaccgagaaagcttcgttcttcaatggcgggccacatccttcgggacagctttaagccggtggattacaaagagggcgagcgctcaaatcttgttctatcagagtttcatcacatcgtcgatgcggcttttttatatactcttctatgatattttatttctcaggtacaggtaactctaaatggattgctaatcagctttctaaagaacaacaggaagatttgttttttatcccgaacgcatggaagaatgacacatgggagttctctttgcgggaggatgagaagatcggttttgtctttccggtctattcgtgggcgcctcccgtgattgtacaggagtttattcggaagctggttctgaacgggtatcagcagcaatatctgttctttgtgtgttcgtgtggagacgatacggggctgacccggcaggtgatggaaaaggcattgactgcgaggggatggagatgtaatgcaggcttttctgtaattatgcccaataactatgtgttgttccccggatttgatgtggatagcaaggaactggaaaagaaaaaactggcagaagcggttccggctcttgaaaaagtcagtagactgataaccgggagagaaactgtctttgcatgcaaggaggggagtttgccttttatcaagacgaggatcatcaatccgttatttgttcgttatcagatgtctcccaaacctttccatgcaacgagtgagtgcatcgggtgcaagcgctgtgaaaaaagttgtccggtagggaatataacgatgaaggaaagaagaccggtttggggaaagaattgcaccgcctgcctggcatgttatcatgtgtgccctcagcatgcggtgcaatatggtaaaaagacaaaaggcaaggggcattattttaaccccgactcagcttattgatcttttattttaatacagcagttggataagtcttcgattatggcaaggctttctactctgacacctttcttttccagtattttacgtccattttggaaggctttttcgataatgaaccccatgcctaccaattttgctccggattgctctatgaggtcgagaatgcctaatgcggcatttccgtaggcaaggaaatcatcaacaaaaagaacattgtcatttggagtcagaaaatcggcactgatcactacttcataatcacggtctttggtgaacgagtgtacggtagtgcttagtgcgttctgaatggttttgggtgatttctttttggcgaatacaaccggtaagtccatgagatagcccgtcatgatggcgggagcgataccgcttgcttctatagtcatgatcttgtttacgtttgtggctgcaaagcggcggacaaattctactccgatggatttcatcaggacaggatccatctggtgattgataaaaccatctactttaaggatgcctccttcgtagcattttccgtcctgcagaattcttttttttagtaattgcattataatctgataattaaataatgtgctaatatgccatttgttactgatatcatacagtattgggttggcatattagcacatcgggcatttgaatatttatttgttgtctcttaagtccttcactctgacggcttttccctcgctctgcgggagagaccctttctttaccagttttactttcggggtaaccagtatttcatcttttaattgacggataatatctctgcggatcttttccagttcgatatagttgtctgtagaaagatcgcttaattccacttcgacgatcatctcatcctgattgttgactgtctccagcgtaatcagataattgctgcctaattcggggaactgaaccagaatcttttcgacttgcatggggaagatgttgactcccttgatgataaacatatcgtcgctgcgtcccttgatccggtcgatgcggagatgggtgcggccgcacggacattttccgggtagtatacgggtaaggtcgcgggtgcggtagcggataagcggcatcatttcacgatcaagtgtagtgagtaccaattcaccgatttctccttcgggaacgggttctcctgtttcaggatcgatgatttctaccagatagcaatcttcccagaagtgcattccgttctgctcctggcattcgaaggcaacaccggggccgttcatttccgtcataccgaaactattatatgctttcacattgagcatccgttctattttacggcgctgttcgtcagtatgcggttcggcgccgatcaccaaggttttcagggttgtttctctcgggtcgataccttcttcctgaaatacttcggcaagacggatagcgtagcttgggatggcgtgtaaggcggtagtcttaaagtcactgatgaatttaatttgccgtttactgtttccggctgcggcaggtacggtaaggcagccaaggcgttctgcaccatattgaaaacctaatccacctgtaaacattccatatccggagctgttctggaagacatctgtcttgcggatccccaccatgtaaaggcaacgggctaccagatttgcccatgagtcgaggtcatgttgtgaatgtacgatgactgtagggtttcctgtagttccactggaagagtggatacgtacaccgtctcttttcatgtcgccggccactagcccgaagggatagttggcacgcatgtccgatttagtggtgaaaggaattttgcggatgtcgtccagtgactggatactatctccggtgatgccgtttttgctgaaaacctctttgtaataaggtgagtttgcggctatgttaatcgtttttttgagtcgctgaagttgcagttcctgcaacttctcgcgactcatgatttcaatttcttcttcccagtattgtgtactcatgattgtgatagttattgcattagcttttccgcaatttccttgccggcagccagtgctttaagattcatttcgacaatagcttctcctttgcgcaggaagatttcgcggatactgtcttgtactttctcgtaatcgatgccgaggaatggaatggttgcgcccagcaaaacgatattggcaactcgtgcagaacctacttctttggctactttatccacgttcagtacgatcttatgcggcaatttgttgatttcagccattactttgtcttcttccggataattggggatgttgacaaacggagtttcgttggttaccagccatccttccggactgagataggggagatagcgcagaccttccatcggttcgagcgaaatgataaggtcgcatttgccggatggtatcagatccgaagcaatcggtttgtcgctgatgcggaggttggactgaacgtctccgccacgctggctcattccgtgtacttctgcttgcttcatgtaaagtccttctttcaaagcagctttaccaataactgtagcgatggacaaaataccctgtccacctactcctgataatataatgtcttttttcatggcttacttacttctttttttgcgtgctaatgtttgaatacactctctgcgcgggatgataacggatacgccattgtattcgatttcttcgcgtatgatctgtctcatttcctcgtggttcttcttcaatggaacaacgacacggatatgggcagggtcgactcctaaaccgatacagatggattcaatacgtcctgtgcccgcagagtcctgaccaccggtcattgctgttgtctcattgtctgaaatgacaataacgacattggcattttcgttgacgcaatccagcaaacctgtcattccggagtgagtaaatgtagagtcaccgattacagctacggacggatgaagacctccgtcggccgcacctttcgccattgtgatggaagctcccatgtctacgcatgaattgatggcgttgaacggagcgttggctcccagcgtatagcaaccgatgtcgctgaatactttatgggaaggatattcttctttgagtacttctgtcagtgtgacgtacatatcacggtgtccgcatccttcacacagtgcgggaggacgcatttcgactacagaagggacgccgaattccgatttgttttctttgccgaccgcgcgtgctacagagtccggatttaattctccgtcttgtgacagtgtgccgtccagacgtccttttactttgatacccatgcccagatagcctttcagatgtttttcaacgaatggctgtccgtcttccagtaccagaatctcgtcgcaggattcaaccaattgcagcaattgctttttaggcaatggatactggccgatcttaagtaccgggtattcacaaccttccggatagttttccatcagataattgtagccgataccgcaagcgacgattcccagttttttgttagggccgtctatgtatttgttgtaaggagattcctcggaagctttgatgaattcgtcctggcgggcaagcaatactttatagcgtttgcgggcatttcccggcaacaggataaactgacggggatcttcactgaatgaaatgctgttctgtggcttctgctctttgcgctctactccggaacgggagtgtgcgaggcgggtgaccatacgcattaagatcggttcgcctgttttctcagagaattcgaatccgttgtataccatgtcgtatgcttcctgttggttgctgggctcgtacatcggtatcagggagaagtctccgtagaagcggctgtcctgttcattctgtgaagagtgcatgctggggtcgtctgccgctatcacaatcagtcctcccttcacacccgtgatggcagaattgacgaaacagtctgcagccacattcatgcctacatgcttcatgcacactaaggtgcgtttgcctacaaatgacatacccagtgcggcttccatggcagttttttcgttggcacaccaacgattatgtatgttctgctcagtggttataggcgccatttggatatattcagtaatctcagttgaaggagtaccggggtaggcatatacacctgaaagtccggcatccagtgcagcttgtgcaatggcttcatcgccaagtaagagttgcttgctcatatatttcctttattagtgttgatcacagtttgttattatatcgggcaaagatagcctttttggctcgttttatcacaaaattacttgaaaatctttctttcattaagtgctttccaatattttcttgcatttgccatgtggtcggcataattggatgcgaaattgtgagtacctgaaaaatcttctttcgcacacatgtaaatgtaattgtgtttcgtgtagtttaatacactgtccaagccctttttagaggggatgcggataggtcccggaggtaaaccgctgttgatataagtgttgtagggcgagttgactttcagatgctcattggtgatgcgtcgcagcccgaaatcctgtaaagcgaacttgatggtagggtctgcctgcaggggcatacctgtgtgcaggcggttgatgtatagtccggctaccatcggcttttcttcgttgttgttggtttcttcttcaacaatggaggcgagggtgcagacttcttccggtgtcatgccgatagcggttgcctgggcaagacgttcgtcattccagaatcgtttgtgttctgtctgcatacgtttgaagaagtcgtcgacactcatatcccaatatacctgataggtctcggggatgaaaagacagggcatggtgaccagcgtataccccatttcggcctgaaaagcggaatcgaatagttggcgggctatctcggcggagtcgatcatcagttgcttgccgatgcttcgcgccagccggtctagtgtccgtacgcttccgatagtgagattcatcggttcctgataacctctgaagaagcggctgaatacatggtatacgttttcgttagggcggatggcataacgtccggtatgtatattctggtcgaattttctatattttgccatccattgaaatccggtgaatttgttgacatgaccggcttgtctgatcttattgtagatggaatctgccgtgtcatcccggtctacatatacatagacggttttggagggatgaaactgaggagcaaagagataataatagactgttcctccggcaatggcgcaaagaaggagagctccggtcagaacggataataagatatttcttgttttctttttcatcttgtgacgtaactttaaaaattgcgtcaaagataggaagattttggataggagcgattcctttcaacggtgaatagttgaaattcggctgattttgtcaactattagcgtggccactggtaataatcggcattggcttctactgcattttctatttcatcgggcaggggagagaagaagtccatatgggtaagtttctcgatgctgtcaattgataccgcataggtggaaagaggctctaccgcctgtctgttgttgaataagaacccgatgccacgagccggtttgacaaaaggagagaggattactttgaagaatcgttcgggcactgccaccttattttttccgatggttttggacggcttgtcgatgataggaccacatataatgataatggcgctatcggctaccgcccagtctcttattttttcttccagatttttccagcctcttctgttcagctgaggatgctgcgggcacatattgctgaaatagaaggattctttcatgacatccggactccatttcatgtcggcggctggtgccatatgtcctttgtcatatcccgagcgtgcataatccgcattggtcgcaatggcgccttttactaaaggatcggcgatgaagttgtcacctctcttttcttttcctttggtttcctgacgggtcagttcgtaagaaacccaattcggaatcttcaggtctttattgtaggaaactgtatagcctttatgacgaatgatctgctcctgacggggaatcaatgaaacgggaatctctaaatctttgccggatggagtggggagggagacggaagtctctatctgcggtttgctactgtgctggacactgtattgctgataatacagataaagcccgtaacaaatgggaataagtacgatgatagcgatgatacaccctaatctttgattggaatgtgacttctttttcttaaataatctcctgctcttacctcgtttcatgcgatttgctttgggggttaataagaaaagcgctaactattctgtagttagcgctttattgtcaagagccgctagccagacttgaactggcgacctacgcgttacgaatgcgttgctctaccaactgagctatagcggcggtttgtttctcgtttacggcgtgcaaaattacagctttatttgagaaaacaaaaggattctgaatattttttgagctttaatttaaaatcttcctttaccataactctttgcataaagtaacggtagtttaactttcgaacattctgctgcgtgccagcatacacgcgcctacaatacctgctttatccttcaatttggatgtaatgatggcagagtctttgttgaccagattgagtgaatacttacgtaccgctgttttgataggttgggtgatataatctcccgttaaagataaagttccgcctataatgaccagttccggattgaagatattgattaatcctgcaatttgttttcccagcttttgccctatttcttcaacaatttcaatacaaagcagatcttccttgttgacggctgtgatgatttcgtcaagcgtgatggggtcttcttcaccggatattcgggtggaaagaatagagctttctccgcttttaatacgctccaaaagaatgcgatgaagggcagagccggatgcttctgtttccagacacccttttttgccgcaatggcagatgatttcattgtcgtatgcattgacgtgaccgaactctcccgagaaaccggattttcctgtgtagactttgccgtcgataataattccgatgccgactccccagctgacgttgacgaaaataatatctttttctccttttacacacccttgcatatattctccgtaagtcatggcacgggtgtcgttgtcaatggttactttatgacccagcttttccgacaggacatccgccaacgggcgttcctcaaaattgaactggctgaaactatatccggattccggatttacccgtcccgatacatttacattgatatttaaaatcttctccttattaataggaagttttttgatgaagttgagaatgagtttgcacaactcgttcatcccttctatcgaattctcaaatttataggggatattcatttttaactctaccatatcacctttaaaattgatcagtccgatattgactgcaaatcttttgatgtctacacctataaaataaccggattccggattcaatccatagagattcgggtggcgtccaccgctggtttccagttttccgtaatcattgatatatccgtcctcacacatttcaccgataaatttggtgactgtgggcacgcttagatctagttcttttgaaagatcgggaatagtggaactaccattatatatataatgtgtaatgatcctctttttaacgagggcatttttagagcccatttctatttctttcaagaattgttggttcatacgtctcttatattttgtaatatctacaaagataattaatttttttattaactaataaggttcttgacgaaaaaattagaattgaatctgagatgatgctgtgctgattccttatagaaagtgaattctctcattgatagttatttgaaatcttcttatataataaggtaataagggtactggtatctgaatagcttcatatttatagtcttattaatgaataaagaagcgaaaatcaactttattaataaaatattttattatctattgtttatttaataaatatagctatatttgtaccgtgatattaattaagatgtaccgtaaccaaatcgtattatgatgaaaaacttattccaaatactctgtgggctgtttctggtagtatcatactcttcttgtatgcactcagaggaagataaggtagatgtacttattataggtggaggtgccagtggtgtaacatccggcatccagtctgctcgtatgggagccaatacactgattctcgaagaaagcacctggttgggtgggatgctgacttctgccggtgtgagtgctgtggatggaaattacagattgcctgccggactttggggagaatttaagaatagattgtctgattattatggcgggctggattctttgaagacgggttgggtaagtaacgtattgtttgaaccgtcagttggaaataagattcttcacgaaatggtagcggcggaaaataatctaaaagtctggaaacaggcttgccttgaagaagtaaaaaggacgggagatgagtgggtcgctaaagtgaaggtggaaggacaaggtgtgaaaacggttcgggcgaaggtcatgattgatgccaccgaactgggtgatgtggcaaaaatttgtggagtgaagtacgatattggtatggaaagcagagatgacacgcacgaggatattgctccggaaaagaagaataatattgtgcaggatattacttatgttgccatattaaaagattatggtaaggatgtgactattccggaacctgaaggatacgatcctaaagaatttgcctgtgcctgtgccagtccggtatgcataactcctaaagagccggatcgcgtctggtctaaagatatgatgattacctacgggcggttgccgaatcataaatatatgattaattggccgatagaaggtaatgattattatattaatctgattgaaatgactccggaagaacgcgtgaaagcattggaatatgcgaaacattatacgatgtgttttgtttacttcctgcaacatgaactggggtataatacacttggattggcggatgatgaatatccgacagaggataagttaccttttatcccttatcatagagagtccagaagaattcacggattagtccgctttaacttgaatcatgcactcaatccatatacacaggatgaaaagctgtaccgtacttgtattgctgtgggtgattatccggtagatcatcaccatacccgctatcatggttatgaagagttgcctaatctgtattttcatccgatcccttcgtatgggttgccgttaggtacattgattcctcaggaggtagacgggctgattgttgcagagaaatctatttccgtatcgaatattatgaatggaacgactcgtttgcaaccggttgtactgcagatcggtcaggcggcaggagctttggctgcacttgctgtgaagaataatcagaagataagtgatgtttccgttcgtgatgttcagaatgctattttggatgctaaaggatatttgcttccttatctggatgtccctgtctcggatgtgaagtttgcttcttatcagcggattggttctacggggattctcaaaggagtcggtaagaatgtggactggtccaatcagacttggttgagagcggatacggtattgctggcgtcagaactggatggtctgtttgaagtgtatccggctgccaaagatgaattcaaaaaaacaggagcggataaattaagtattgaggaggcagttcaacttgttcagaagatagcagaaacggaaaaactacatactactgttgatccgcaagcgctttggaaagcatacggaatgcaagaaccggatttgaaacggaatattttgagaggggagatggctgtaatgattgatcaggtattggatcctttcaataaaaaacagatcgatatcactggtaagtatattcaataggttaacatatatccaagtaaaaacaaaaaaataaaactatggaaactaataatcgtagagatttcttaaagaaggcagctttggccggagcttccgctttggttgccccttcattatttgcagctgacggagaggggagaggggaactctccccgaagatcaaggctggcgatttggaaagcaaattgattgttcccaaaaataatggcttaaaaattacaggaacttttttggatgaaatatctcatgatattcctcatcagaactggggtgagaaagaatgggatctggattttcagcatatgaaaagaatcggtatcgatacagtgattatgattcgttccggttatcgtaagtttatgacttacccttcaccttatttgctgaaaaaaggatgttatatgccgtcggttgatttggtagatatgtatttgcgtctggcggagaagtataacatgaaattttattttggtttgtatgattcaggacggtattgggatacaggtgatttaagttgggagattgaggataacaagtatgtgattgatgaggtttggaagatgtacggagagaagtataaaagttttggaggctggtacatcagcggcgagattagccgtgccacgaaaggggctattgatgctttccgtgctatgggaaagcaatgtaaagatgtatcgaacggactcccgacttttatctctccgtggattgatggcaaaaaggctattatgggaacagggaaactgacaagagaagatgcggtttctgtacaacaacacgaaaaagaatggaatgaaatttttgatggaattcatgaagtggtagatgcttgtgcttttcaggatggacatatcgattatgatgagttggatgcgttctttactgtaaataaaaaattagcagataagtatggtatgcaatgctggaccaacgccgagtcttttgaccgtgatatgcctatccgttttctacccattaaatttgataagctccggatgaagctggaagctgccaaacgtgcagggtatgataaggctattactttcgaattttctcattttatgagtcctcaatctgcctacttgcaggccggacatttatatgatagatacagagaatattttgaaattaaatgagtgatatgaagtctacaattaactttggctatcttattttcctttctgttgtagcagctttgggaggatttttgttcggatatgatactgctgttatatccggaacaatcgctcaggttactcaactttttcaactggatacgttgcaacaggggtggtatgtgggatgtgctttaataggttctatcgtcggtgttctttttgccggtatcctgagtgataagctgggacgaaaaatgacgatgattatttcagcgactctgttttctacatcggctttaggttgtgcgatctccgcagacttcacccaattggtagtctatcgtattattggtggagttggtattggtgttgtgtcgattgtttctcctttgtatatatctgaagtggctgtggcacaatatagagggcgtttggtatctttatatcaattggctgtgacagttggatttttaggagcttatttgattaactatcaattgctggcttatgctgaaagtggtaatcagttaagtatggactggttgaataagatatttgttactgaagtctggcgaggaatgttgggaatggaaacattgccggctgtgttattcttcatcattatcttctttattccggagagtcctcgttggctgatcgtaagaggtaaagaagaaaaagctgtcaatatattagaaaggatatataattcagtttcagaggctgcaagtcaattaaaagaaacgaaatctgtattgacgtctgaaacaaaatctgaatgggctatgttaatgaaacccggaatttttaaagcggtcatcattggtgtatgcattgctattttgggacagttcatgggtgtaaatgctgtactttattatggcccttccattttcgaaaacgcaggactttcaggaggagattctttgttttaccaagttctcgtaggactagtcaacactctgaccaccgttcttgctcttgtgatcatcgacagggtcgg

SEQ ID NO: 4578 - DNA, 32116 bp, Unknown
  gut microbiota DNA sequence
cactttttatttttagtatccgttttaagggaaccggattattttttattcaaggcttcgaagatcaatccttccagttcttcagcaagttcgggattatctttgatacataccttggctgcatcacgtccttgaccaagtttagtgtcattgtagctataccatgaaccgctctttttgataattcccagttctgcgcccaaatcgatgatttctccggagtgagaaataccttcaccaaacatgatatcaaattctgctttgcggaaaggaggtgctactttgttcttcaccactttcaccttagtcagtttaccaagaacttcttcaccgtctttgattggctggctgccacggatatctatacgtacagaagcatagaacttcaatgcgttaccacctgtcgttgtttccggattaccgaacatgacgccaatcttttcacggagctggttgataaagatacaagtcgtacgtgttttgctgactgtaccggtcaatttacgcaaagcctgtgacatcagacgtgcctgcaaacctaccttattgtcacccatgtcgccttcaatttctgctttcggagttaatgctgctacggagtcaataacaataatatcaatagcggaagaacggattaactgttcggctatttccaaggcctgctctccattgtccggttgagaaatccagagattgtctacatccacgcctaatttcgctgcataaaaacggtcgaaggcatgttcggcatcaataaaagcggcgataccaccggctttttgtgcttcggcaatggcgtgaatagccagagtcgttttaccggaagattccggaccatagatttcgatgattcttcccctaggatatcctcctacgccaagtgccacgtttaaagcaatggagccggtaggaatcacttccacttgttcaacactatcatcacccattttcatgatagaacctttaccgaagttcttttctatcttttccatggtagcctgtaaggctttcagtttttcgcttgatgccattttattatctgtttcaaaattaagttcgtctttctttgccataccttattcttgtaattaatggatttattgatttaaaatctgtgaggcatgctctttggttttcacttctttgggagtgataatccgttctatgattccttcttcattgatcaggaaagtagtgcggaaggttcccatataggcacgtccatacagctttttctctccccatacaccaaattcttctaccaactttttgtccgtatcggctatcagcgtaaaaggaagattattcttatcgatgaatttttggtgcgacttctcgctgtctacgctgacaccgattacttcgtaaccggctttacgcagttcggaatagttgtcgcgcagactgcatgcctgtgccgtgcaccccgatgtactgtctttcggatagaaatacagtactatcttttttcctttataagcacttaggcggatctcttcacctttttcattgatacctaatacttccggtgctttatctcctatattcttcattctgactcgttctattatagttccagatctttatcaaacacttcatgccaaggcagtccctgcttattgagctgttccatgaacggatccggattaaattcttctacattgtttacacccggacgttgccattcgcctttgaagaacatcatggcaccgatcatagccggaacaccggtggtgtagctgactccctgcatacctgtttccttgtaagcttcctgatggctgcagttgttgtagacatagtaagtacgttcttttccgtctttgatgccacggatacggcaaccgatagaggtttcaccttcatagttctcacctaaatcctgtgggttaggcaatactgctttcaagaattgtaatggtacgattttagttccgttataatcaacttcatcgatacgggccatgccgatattctgaatcacgcgtaagtgagtcagatattcttgtccgaaagtcatccagaaacgggcacgcttgatagtcgggaaatgcttgaccaacgattccagttcttcatgataaagaagataggaatcacgtggaccaatattaggataagtcagatctttgtggatttccagcggaccggttgtcacccattgaccattctcgtaataacgtccgttctgagtaatttcgcggatattgatttccggattaaaattggtggcaaatgctttatgatgatttcctgcattacagtctacgatatccagatattggatttcgtcgaaataatgtttggctgcataggctgtgtagattccactgactcccggatcgaaaccgcaaccaagaatggcagtcagacctgcttccttgaaacggtcgtggtaagcccattgccagctgtattcaaaatgagcttcatctttcggctcatagttggctgtatccaggtagttgacacccgccttcagacaggcttccataatggtaagatcctgataaggaagagcaacgttgattaccatttccggcttaaagtcattgaataaagctaccagttcatctacattatccgcatccactttggcggtttttatattgggattgcctatagctttgacgatattatcgcatttctcctttgtacggctggcaatcatgatgtctgtgaatacatcggcattttgtgccactttgtgtgctacgacagtaccaacaccgcctgcaccgataataagaactctacccatttcttttaattaataaattataaatcaaaaattaagattttagaattgttagcttggcaaatatacgtgattattttcagataatcaccgcgtcgctactcctttttatttgaaacgttgcaagatgccactctcaaattccagcgtttttccgttgtagaaccaagtttcgaaacgactgtctttttttaactgtatttctacaggatcacctattgacagacgacattcgtcggtgttcataccttcttccaaatcaccccgtgcgatgattgcccaacgtttatctgtgatagccggatacttctgatggatgtctccaaatccgaaaaggtcttcaatataattctcgtttttgacgataacgtcatattttaggtcaacctctgtttcataaagtgatccatgccgatcctccagtgagaggataaccagacttcccggaccggagatttttacttcttttattttcaaaacagtgtagcgaggcaaatgtatgcggttttccatttgcttgttttcaaggttgaagactctttttacagccaatgtccgtttcggatagacggtcagatcaatatatttgtctttcaaggtttccagatttccggactttttgctactgaaactgatggcgttggaaaaatatctcattttcttttcagcttggaaatcgctcacgtccataccggaattagtgcgggaaagagctacttccagataataggtatgtccctgcgaatcctgaaatatgattttcacgggatatgcctgactgccaactcctatggcggtaatggttgcttcggtgttgaccggaatagacacttccctatatccggagtaactattggcatcgtccacctgtgccatatcggactgaacatatatctttctgcctgtcagtaaatcttttgccgtgtctacatctttcagattaactaatccgttgatataggcacggggattcttttcgcaaatttcatccggacgtgtatttttaatctcataataatatttttctccgtcacattcgaagatgagtcgagtggaatagctcatgtcatttgatagtttttgagatttttcttcatatccggcgaaagtaagaatcttgtgtttcaaaacgctgttatctgctcctttttctgtctcatacaccgaaagggtggggaggaacatgtcacgtccggatggaataaacatgaatttcattccgggtgtccatttacataaaagttgcagtgggaagttctcttttatgaactgttcttcttcacttagaggatcctcctgattgggaatagtagtgacaagataatcattttgcgctgtgatatgagaggtaccacaaccaagcaggattagaaataggacgattgttctcatatttatttactttagatgaactatgtaatcttattgtttgttttatagataatggcaaatgtatgtattttatatcgcattagatggtatttcccaatctttttgatatctttgcccccgattttaacttaaacgttataacaaaatgaagaaagtattcgtttcaatttgcattgccagcacagtacttgcaatgttttcatgccgttcggttgagaaggcagtcccattggcttcaatcaatggtgagtggaatattatagaagttaacggctcgaaagtaactccgggcgaaagcagaacccttccctttattacttttgatacagcgaccggaagagtatccggtaacagtggatgcaaccgtatgatgggtagctttgacgtgaatgccaagccgggcagcatggagcttaagggaatggctagcaccagaatgatgtgtccggacatgactaccgagagaaatgtgttaggtgcgcttgcacaggtgaaagggtataagaaagccggtaaggataaaatgtttctttgcaatgagtccaatcgtccggttgtagttcttgaaaaaaaggaggctgacgtgaaactttcagtattgaacggagaatggaaaataaaggaagtgaatggtgaagcaattccttcgggaatggaaaagcaacctttcattgcttttgatgtgaaaaagaaaacacttcatggcaatgccggatgtaacttgattaatggtggttttgaaactagcactactaatgctaaatcaatctctttccctggggtggctagcacaatgatggcttgccctgatatggaagtggaaggtaagattctgaaagcaatgaatgaagtgaagtcgttcgataaactttccggtggcggaatcggtttgtatgacgcaaataatgcgttggtgattgtacttgaaaagtaagatatacgtattatattaaataggtatgcctgtgtcgcacataacgatacaggcatattttttattcctttatgatctattcttttgctttattgaaccagagccgtttccatttgtttaatgagtcgatagctgtttggcttctatgtgacttgacagcagtcatttcgatttaaaactgtcgttttggcagaaaatatgtcacgtattcgtccgatttctttttggcacatggtttgttttttaatcagcgtccgtttgaaagcccttacaaagagaaagaaaacaaccggacaaaaagaaattgaataataataaataaaaagaataacgatcatgggaaaaattattggtattgacttaggaacaacaaactcttgtgttgccgtatttgagggcaacgaacctgtagtaattgcaaacagtgaaggtaagcgtacaactccttctgtggttgcatttgtagatggcggcgagcgtaaagtaggtgatcctgctaaacgtcaggctattactaacccgacacgtacgatcttctctatcaaacgttttatgggtgaaaactgggaccaggtgcagaaagaggttacacgtgttccttataaagtagtgaaaggtgacaataacactccgcgtgtagatattgacggtcgtctgtacactccgcaagaaatctctgcaatggttcttcagaagatgaagaagactgctgaagattatctgggacaagaagttacagaagctgttatcaccgttcctgcatatttctccgactctcaacgtcaggctactaaagaagccggacagattgcaggtttggaagtaaaacgtattgttaacgaaccgacagctgcagctcttgcatacggtctggacaaggctcacaaagatatgaagattgctgtattcgaccttggtggtggtacttttgatatctctatcctcgaatttggtggtggtgtattcgaagtcctttctactaacggtgatactcacttgggtggtgatgacttcgaccaggtaatcatcaactggctggtacaggaattcaaaaatgacgaaggtgctgacttgactcaggacccgatggctttgcagcgtctgaaagaagctgctgaaaaggctaagattgaactttcttcttcaacaagcacagaaatcaacttgccgtacattatgccggtaaacggtgtgcccaagcacttggtgaagactttgactcgtgcaaaattcgaatcattggctcacggattgattcaggcttgtctggaaccatgtaagaaagcaatgagcgatgctggtttgagcaactctgatattgatgaagtaatccttgtaggtggttcttcccgtattcctgccgtacagaaactggtagaagatttcttcggaaagactccttctaaaggtgtgaacccggatgaagtagtagctgttggtgctgctgtacagggtgctgttttgacagacgaaatcaaaggtgtggtgttgttggatgttactccgttgtcaatgggtattgaaacactgggtggtgtgatgacgaaattgattgatgctaatacaacaattccggctcgtaagagtgagaccttctctactgctgccgacaatcagagtgaagtaactattcatgtattgcagggagaacgtccgatggctgctcagaataagtcaattggtcagttcaacttgtcaggtatcgctccggctcgtcgtggtgttcctcagattgaggttacattcgatatcgatgctaacggtatcttgaaagtatctgctaaggataaggctacaggtaaagaacaggcaatccgtatcgaagcttccagcggtttgagcaaggaagaaatcgaaaagatgaaggctgaagctgaagctaatgcagaagcagacaagaaagaacgtgaaaagattgataagctgaaccaggccgacagcgtaattttccagacagaaaatcagttgaaggaattgggtgataagttgcctgctgataagaaagctccaattgaagctgctttgcagaaactgaaagatgctcataagtctcaggatttagctgctattgatacggctatggcagaaatcaatactgttttccaggctgcaagtgctgaaatgtacgctcaaggcggagctcagggtggtgcacaggctggtcctgatatgaatgcaggtcagaatgctggtcaggatagtagcaagcatggtgacaatgttcaggatgcagacttcgaggaagtgaagtaagattagctgaattagtatatataaaaaggtgtgtcagaaaaagttctgatacaccttttttatttgaaactgaatttatttcaggaacagagaaactacactataaatacatgcagctaggagtccactgacaggaatagtaagtacccatgcagtcatgaggcttttagttactccccagcgaacagcagataaacgtttggttgctccgaccccgataattgctccggtgatcgtatgagtcgtacttacaggaattttcagcatttcggtgatataaagtgtaaaagcacctgcggtttcggcaaccataccttccaatggtgtgactttagtgattctggttcccatcgtttttacgattttccatcctccggacaccgttcccagtgagatagcagtaaaacaggagaacgctacccagtccggtagatcagaaatactgtttattcccattcccagacccatagagtgggcagctatcattgcagcggcaatgatacccattaccttctgcgagtcattcagaccatgtcctacactgaacatggcggaagaaaccaactgtaatctcttgaaccacatttcagcggtatgcggatttgcacgtcggcagatgtaaagcacaagtagagtaaatccgaaagcgataaccataccgataaatggagccaggaagataaaagcggcaatcttaagaatgatattgagctgaatagcttcaaagccgtttgccatgatagcagctcctgcaaaaccacctataagcgtatgggaggaagaagacggaatacccttccaccaggtaatcagattccatgaaatagcagcaataatgcccgccaggataataggtagcgtgatgtattgttcaacgactgtctttgacacagtgtttgctatgccaaagccacctataatgtatttggctatgaagaacgcaacgaagttaaagaatgctgcccacaataccgcctgaaaaggagtcagtactttagtcgatacgatggtagcgatcgagtttgctgcgtcatgaaagccgttgatataatcgaatatcagagctagtataatgatagtcactaataattccatgtgtcttgctctgcttttatgaatactttacgatcaggttttttaatattttccctacatgttctgctgcatcggttgtcttttccagctcatgcatgatctctttaattttaatcagttcgatacagtctttttcttcttcaaagagtttggtgataaaaagctcgtatacgtcatctgcctgattttctatatcgtgtaattgggtacaatagttgcgcaatggctttggatttttgcggaaagtctccagttcatccatggctttacctatattgatagcctcctcgtgaatcagacggctcaattcttttccactttcggaaatagggcggggattatagataacaatgcgcttggcgctactgttgattccgtcgataacatcatccatgcaggaagccagatcgtgaatatcttcacggtcgaagggagtgatgaatgtcgtacttaactcgtcaaagattaaatgagtcaatctgtcaccttcacgttccatgtctttaatttgtttgtagtaatctgctctttctgtgggcagatcatgttccagactttcaacaagtagaacggatgaggcagataaaacatctgataactgcttcagtagaggaaagaactttggttctttgggcgtaaatttactaaaaaaagaatttttcataaatatgagtacattaaattgtttttgagatgtttaatttgatggccgttgttattaataaacaaatgaataaagttttttattgcttcgatcctaacttcgctcgtaatatttctattattgcaggcaatattgaaataaatataatagcgataatcaagagtttaagattttcctgtacgaacggcagatcgccaaagaagtagcctgcatagcaaaataaaactacccatatagctccacctatcaaattgtagatcataaaataatagtaatgcatttttcccattccggctataaatggagcaaaagtgcggacgataggcacaaagcgggcgagaataatcgttttcccaccatattttttataaaattcatgcgttttatcaagataactttgtttgaatatcctggagttgggattatgaaaaagtttgcgtccgaaaaaatgtccgatcatgtagttgcaggagtcacctaatacggctgctgcaaataagattaaaacaagaatatggatatcgatcggcataccgggtaatgcggaaatggctcctgcaacgaaaagtaaagaatcaccaggaagaaagggagtgactacaagcccggtttcgcaaaatataatgatgaataggatagcatatgcccaagtatggtaatcctgcactatattaatcatgtattgatcaatgtggagaataaagtctaatataaattccattatatatcaagttattaatatgtaaaagtgaaatcgtatgcatattcccggcaatggaaaagactcttcttgctttcttgccttgaatataaagagataaaatgggcatgaagatacactcatctcatcccatagaaggaaaagagatatttaaataagtattcgtcctagtgtatagacgtaatatctatatgagaatttggtgagatttgtgtagtaggggagaccagtccatttttctttcggaaattgatattttaaggaacttagtatccgaattgtaacggaagaaacgttgaatcttagaattttggaaagagaagtggtacgggataaaagtgagtttcctaaaataccatcggcaatgttgcaatcatattttccatcatatttcccttcttggaaggagttgttttctttaccggattgtttgactacagctttggatcggtaactctgtgacttattatgggattgtatagtggtagtaccggcctctgtccggaactcctgtaattctttatcgggcactaaattgcatccccatatcagaaatataccaaataatatacagaaaatgtatttcgccataacagtcgcaaatgtagaaactatttttataagaaatacatattcgaaagtataattaacaattagatttgggctccggggaactggaatctaatggtaatatcttcttctttatttgtttgatatgagtttcatcggagtataactgattccgtttgtttgttgcctgtcgtttgttttttcaaatcccagagattcgtaaaacctgatagcgtatgtagatgagtttacagttatttcatttgccggacaatcacattgggaatagtcaaacagttgcttgcctatcccttttctatggaattcctttttgatgaaaaacaaagaaatgtgtttgccctcattcttggttcccataatacctattagtttattttcttcgaaagctccataaatgcagagttcattcatcaatttatcgttgaatataaaacttttgaaactctcaagaccttcgtcttcgaaatcatcctgaccacattgcaagtatacttctaatgctaaagttgtcgcctgctgaaattctgctttatctaatttgcgtatcataattaatcatttgttgagaatataatttttgtctgtcgggcaagatactgattttttttatttcagacaatagggtatttgcagattgaacgatcttatttatagaagcaggaattatttactttaaaactttattaagatgaaaaagtcagttatacttttggttggatggttattagcttttctatggatagggagtgctgatatatgggcgcaggatgcaggagattatttcacgattgtcggaatggtgaaggataagcaaaataagagaacacttgaaaacgtgaatgtatctgtgcaaggaagtaatatcggtacggtgacaaatgcagagggagagtttgctctgaaagtcaggaaagaagaagtgccgcgagagttggaaatctctcacataggctatatcaatagtcatgtatctttagataagaataattcttctaaattgacggtctggatgatacctcatactaaccagttgaatgaagtggtcgtttatgccaataatccgcgtacaattatagaaaaggcgattgagaagattccggtaaattatagtgccaaccggaatatgcttaccagcttctatcgggagactgtgcagaaagggcgccgttatatcagtgtatcggaagctgtacttgatgtgtcgaaaacagcatacaccaatcgcactacggattatgataaactacaggttctgaaaggacgccgtctgctaagtcagaaagttagtgatacattggcagtaaaggttatgggtggtcctaatatatctgtagttttggatatcgtaaagaataaagaggcgctgctggaaccagaagaattgaacaactatgagttctggatggctgaatcggcattgatcgataaccggatacaatatgttattaatttccgtccgagagttcttttaccatatgcgctgtttcatgggaaattgtatgtagattgtgataagctgtcgtttacacgtatcgagatgaatctggatatgcagaataaatcgaaagcaattgctgctattcttcatcagaaaccatttggactgagattcaaaccgcaagagttatcttttctgataacctataaaacgatagatggaaggacttatctgaattatatccgcaatgatattcgttttaaatgcgactggaaacggaggcttttctctacgagctatgcagtaacctcagaaatggtggtgacagatcggagggagagtccgtccgagataattccgcggaataaagtatttacctccaatcagattttctatgataaagtcggaaattactggagtgaagacttctggggaaattataatatcatagcacctacggagtctctggaacatgctgtcgataaattgaaaaagcaatctaattaaaatcagaattgttttcttatatttgggaacaatcgtaaaatgatagaagtatgctgaatgaactgctcatactgacaaaaataaaggcaggtgacataaaagcgtttgaggaactatttcgctgttactattctcccttgtgttggtatgcggcaagcattaccggacggatggaggtggctgaggaaattgttgaggaactgttttatgtgctttggaaggatagggaacagttacagattttccagtctgtaaaaaactacctctacagggcgacacgtaatcagtcaattcaatactgtgagcatgaagaggtcaaagagcggtatagagagtctgtgctgactgcatcctcttcggaacaggcgacagatcctcatcagcagatggaatatgaagaacttcagaagctgataaataatacccttgagaaattgccggaacgcagaatgcagatatttaaaatgcaccggacggagggaaagaaatatgcggaaattgcagtccagctttctctctccgtcaaaacggtggaagcggaaatgacgaagactttacgaactttgcgaaaagaaatagaaaattatattcaaatgaaatgatgaaaacggatattcataaaataaagacggagcaggcttggaatcggttgtacgaccgattggataaagatcatctgcttgtagaagaccatcggatgcctaaaatcccgatgtgggtacgctatggcactgtagcggcgatggtggtcggtttggtttttagtactttgtattggggattcggtcaaaaagaggaattacctgactttataacacaggagaatcaagatgttcctacattggtcacgactctggaagatggttctgtcgtgttcttggcaaaggagacttctatccgatatccggaacattttgtttctgataaacgggaagtcagtttgcagggagatgccttttttgatgtggcaaagaaacagaagcaacctttttggattgatacaaaggaagtaaagattgaagtattgggtactgcttttagtgtaaagagcgtcgaagatgctccgttccgtctttcggtgcaacggggaaccgttagggtaacccttaaaaagagaaataaagaatgttatgtcaaagctggtgagacagtggtattgcaatcacagcaacttttgctcagttcgactgaaaatgccggagagttgaatcgctatctgaagcatgtctgttttaaagatgaatctttggggcatattctgaaagtaatgaatatgaatgcaggcagttcgcagatacgtgtagcttctcctgcgcttgaaaaaagaaagctgacagttgaattttccaatgaatctccagagactgtggctacattgatagcctatgcgcttaatttgaagtgtacacggcagggggatacattcatactgacagaataaataaaaaaaagtgagatgaggatggtttatcgctatatggtgattctgtgtttgttctttatcgtaccggatacgttgagagctgacggagaagatgtgctggagcgtatgatcagtctgccgaagatgaaaggaacggtctattcactgttaggcaatatttctcagcagtcaggttatctgtttatctatgacagtaaagtagtagataatgatgtaacggtgaagatacggaaaggagagcgaaccattcgtcaggctatttatgagataacaggagataccagcctggaatttaaagtaatagggactcatattctgataacttcttcttcaccgaccaaacagcaacaggcgaaaccttcatccgttcaccctgtaaatctgatgcttaccggaactttactggataaggaaaccggaatgcctgttgcttctgcatccgttggagtccggaggacatctgtggggattattactaatcaggaaggagagttcagactttccttaccggattctttgcaaaacgattcggttgttttttctcatataggatatgtttcacaaactctggaagtttcagttttggcaggtcgccatcatattctgagcttggaaccaaaggttgttcctttacaggaagtagtggttcaatgggtcgatccttataagctgctgaaagaaatgggaaggcaaagagagcagaactattctcattctcctgcctacctgaccacattttaccgtgaaggagttttattgaaaaataaggttcagaatcttactgaagcagttttcaaagtttataagatcgcttcgcattctcccgtttccgatcaggcgaagctgttgaagatgagtcggctgagtaatgtcgaagccaaagacagtctgcttgtaaaggtgaagtccggcattcaggcatgttttcagatggatataatgaaggatatgccttcattcctgatacctgacgcaggtgataacggttatctgtatacttcgcagggagtgacattcatagacgaccggtgtgtgaatgtcatacactttgcacaaaagaaggagattatcgagcctctctattgcggagatttgtatattgatgccgagacgaatgccttgttacaagctcgttttgaggtagatccccagcgtgtaaagaaagcgtcggaaatgtttgtagaaaggcgcacgcatggcattcagataataccgcaaaaggtggtttatactatttcctacaaaccatggcaaggtatctattatattcatcatatccgtggagacctttctttcaaggtgaaacggcgacggttgctgtctgctagtccgcagatgcagatctggtttgaaatgatcacttgcaaagtggatacggaacaagtgactgcattcccgcgggcagaaagattaccgacgcgtactatcttctctgatctgaatttcaaatatgatgaagacttctggagggattttaatgtgatacctctggaagaggaacttggtaagctgattgagagaatctctttgaaaatagaagaaatcggcccttgatttgttttgccattcgccgggattgctgtaactttgcgcccggtttaaaagattgtagaatatggaattgcctaaagatccgatggtgctgttcagtgtcatcaatatgaagttgcgtgactgttattcttcgctagatgagctttgcgaagatatggatgtaagcagagaagatattgtcagtcagttgaaagctgcaggttttgaatatagtgcggaacataataagttctggtgattttcagtcaacttcggcttgtatataaagagttaacagcgcctccatggtcttgaaaaagattatggaggcgtttttttattccttgtatgccaatgtcatatttcctcttttctattaataaatgtaaaatcggctcttgtgcatttaacttcgttccttttcggcgttctaataaccaaagctcagaaataatagatgataaacgaagataaaatccgaaaagcttgttcctcagatcgcgagcggggattcaggttgctggtggacagttttcaggaaccgatatataattatatccggagaatggtagtgtctcacgaagatgcggaagatgtgctgcaagaagtcttcattcgtgtattccgccatttggatcagttccggaatgaaagttcgctgagtacatggatctacagaattgcaacgaatgagtgtcttcggttattgaatagtcgtaaagaagaagtaatatcagcggaagatgttcaggaagaactgatgagtaaactgaaagcttctgactatgtcgactacgaagatgaactggctgtaaagtttcaggaagctatattgactttgccggaaaagcagcggatcgttttcaacttgcgctattacgatgaactggaatatgaagatatcgcccgtgttctggatagtaaggttgagacactgaaagtgaattatcactatgcgaaagataagataaaggaatatatattaaacaggtaacatcatggataaggattttgattttgacaatattggtaagcggacaccttatcgcactcccgataacttttttgaggagacacagcgtaagatattggaacgtacggttgacgagcaacgcaagaagcgtcggctgaaaaggattattcctactgtgattgctgtagcagcagtattggccgggattttgtttacgccgtctctccgctatatgaataccgacacaccatctgcttcaaatatattggctgtcgataaaaataatgtaacaacagatccggtagataaatggattaaggaattgtcagatgaggagttggaagagctcgtcagcttctctgaaaacgatatatttttaaactgaataactcaattaattattaaaacgtgaagattatgaagactaagtttatttatgtagtgttgatggctttatttttgggaagccagatgaccctttctgcacagaataaagaaaacaaagaaagaaaacagcatcctacaccggagcagatgatgcagatgcagaccaatcagatggtgagagcgctcatgctggatgatgcaacggcagccaagtttactccgatatacgagaagtatctgaaagaacttcgtgagtgtcgtatgatgaacttcaaacccagagcgagaaaagatgcagctcaaggtacggaagccaatactgccaaagaaactccaaaaccggttatgacagatgcggaaatcgctaaaatgttgaaagatcagtttgcgcagagtcgtaagatgctggacatccgtgagaagtattataatgagttcagcaagattctgtctcaaaagcagatcatgaagatttatcagcaggaaaagagcaatatgaataaattcagaaaagagtttgaccgtagaaaaggacagaaaccgggacaaggtcataaacccggacaagaccgccagagacaaagacagcatacccctcatcaaactcaaaagtagataatggattaggtattatttattatagtgttttattttactaaagtcaacacaaattgggcataggcagatatatctattcttttcagtatcgtttgattattcattgtgtcttgttactgataagttttggcagcctatgcacagtccggcaaagagagctttgccggacgtgtagttgatgctgactcatgatacatggtattctgcgtctgaatctgctggaaggataaagctgattaaatatttatcagtctgaaacctctgcggggtattaattgttgtatccatgcgaaaacaatgaaaactttgctgaatggagtttcgactgattaaaaaattaaaggacagaggacgttggcgtatcttcaaactcaaattgattgatgcgcggctttactttgtcagtatctttgtcgggttactgacggggcttattgctgtgccttatcattacctgcttcagttcttcttcaatcttcgccatgacttctttgattctcatcctaaatggtattggtaccttcctctttttctgttaatgtgggggattcttatatttgtctcctggctggtgaaaaagatgccgttgatcacaggaggaggtattccacaaacacgtggagttatcaatggaagagttgcgtataaacatcctttcattgaggtgattgccaagtttgtgggaggaatacttgcgctaagcaccggtttgtctttgggacgtgaaggaccttcggtgcagatcggttcgtatgtaggatgtctggtttctaaatgggggagagtgcttgccggcgagcggaaacaattgttggcggcgggtgccggtgccgggttggcggctgcttttgctgctccgttggcttcctcattgctggttatagaatctattgaacggtttgatgcgccaaagacggcgattactaccttgctggcaggagtcgttgccggaggagtcgccagttggctttttcctatcaatccgtattttcagattgatgcgattgtaccgggaatgactttctggtcacaggtaaagttgtttcttcttttggcggctgtggtttctgttttcggaaagttcttttctgtcactacgcttcaggtcaaacatatctatccggccatcaagcatccggaatacgtaaaaatgctatatctgctctttattgcttatctcatctctatggcagaagtcaatctgacaggaggtggggaacagtttctgttggcacaggccatgcatcccgatacccatattctttggattgtcggtatgatgttgttgcattttgtattcagtaccttttctttttcgtcaggactgccgggaggaagtttcattcctacattagtgacaggagggcttttagggcaaatagttgcattgattctggttcagcaaggagtgattgcttatgaaaatatcagttatatcatgttgatctgtatgtctgcttttctggttgcggtcatacgtacacctctcaccgctattgtgctgattactgagattacgggacatctggaagtcttttatccttctattgtagtgggaggactgacttactatttcacggaaatgcttcagataaaacctttcaatgtgattttatatgatgatatgattaattctcctgcgtttaaagaagaggcccgctacactttatcggtagaggtcatgagcggttcttacctggatggtaaaatcgtggatgaacttcgcctgccggaacgttgcattattattaatgttcatcgtgaccggaaaaactggcctcccaaagggcagaaactgatgccgggggatcaggtgcagatagaaatggactcgcaggatatcgagaaactctatgagccgttagtcagtatggcgaatatttattaaaaaagaagtgaagcgtttattcaacgcttctcaaccatgcaatttcttctgcccacttgctttcatcgggtgtttcaagaataagtggcatattatcgaatcttgaatctttcattaatctttcaaagaatgcactcccggtcagtccctggcctatgttatcgtgacggtcaacatgactgcctaattcttttttagaatcattcaggtgcataccacgcagatactcgaaacctacttctttttcaaattcgtcaaagactttatcgtaatcattcactatgtcatatcccgctgtatatgtatggcaagtatccaggcaaatacctacacggcttttatcattcacccggtcgatgatatatcttaattgccagaattcacttcctaaattactgccttgtcccgcagtattttcaataacggccgttactcctttagtcttctccaaagtcaggttgatactttctgcaatgagtgcgagacaatcctctacggagattttattcagatggctgccgggatggaaattgagaagtttcagtcctaattgttcgcagcgttgcatctcatctaaaaaggcagctcgacttttctccaatccttcttcttcggggtgtcccaaattaataaggtaactgtcatgcggtaaaatatagtctgtttggaaattgtacttagtgcaattttctttgaaaagacggatgttttcttctgtcaatggtttactcacccattgacgttgatttttagtaaacagggcaaaggcatttgctccaatctcatgcgcattgacaggggcgaattctacgccgccggatgcgcttacatgtgctccaatgtatttcatcttttattctatttaaattttatctgttgatataacatttatgcaggtttcaatgtttgcgtagagtaccaacataggcaaagatacaattttttagtagtaaactcaatgctcattatgataaaggtacagtgatctactgtctttttatatcccacatctcaggtattaatggttgagttgtcagatgttaatatctgagatgtcaactgttaatacctgaaaagtcagatattaatacctgtcatggacattattaatgcttgaaatgtggcataataagcattgtcaccttcaataaaagacaataaaagaaaggagctattcgtaagtttataataaccattgaatagctccatattgtgtgccagaatggagaaattatatctcaaaatccggtaaatagtcagtcagaaccttattgacctgtttcccttgtacttgatctgtgatgatagtcgcaccttccttcttgccggcatcgtatttcaaagaaaccttttccgcttgatgggtgacgctgattgccgctttccctttctccgtcagattgcaggtaataatccagtcgcctacttgtaccgtattgccttggcgaaccactttcatatccgcacggttatttccatgtgtatccataacggtgaggaaacgggcagttttacatggaatggtagtagacgaaaaatgccagtgattgggatacttcacagcttttccctgggcattggttacattcttccagttggttggagcgcagaagaaggtatctacgatggcctgttccgtctttgccgaactgaaaagatgagcaacagagatgccttcatccttattctttcccgtaactttcacttcatcaggaagttcctgcatttccatcggaagttctaccgtatgcagcagatagctccatgtgaccgcttcttttccttccagttcatcataaatcacatacactcccgtattgcctaattgaatgatgtgccgacggaacatcttcagtttgttctcatcccatcccttttcgggagtgtactgcgtgccggaaagttcaccacgtttcaaccagataggagctgtgatctttccgtaagcattggaagcgtctcccaccatatacgaaatcttttctccttcataccaacggggaatccatccgtaaccttccgtcccgatagtctgagtcattccattgaccagaatactgttgtgtgcacgggtgtttcgataggaatacatacaatggtcatcggtaaaaccggtacgatgtccgctgctatagaagatcgccttgccgccatagaaggtattaaatgcattctgattggccaatgcgtgcgaagttgaaccgtatggactggaacggaatgacaacattgcgttcttttctatatcccccaacgaagtatgcatcgtagcaattcccgtttcattaaatactttcgtcatcggcaactctgccaatgagtgttcttctttcgggagtgccttgtcagtaatgcagcgataccaggtcagatcacctgcttttccaagaaaagactttttcatgatatccggttctttctctagaatggtacgtgcgtaggcggctgcccacggattattgcattcacgtgctaaagcatccgcatagccgacccgtgtcccgttcggtttcattttcgtttcatgggagttaccgtgtcccgcagatttggagaacggaggctgatgatagattacatagagcacattgttgttataccagggatcggcaaagaaatcgaaaccgctgatacgtgaatagaaagcgggaacttcgatcaatgtacgaaggttgacatggaaataagagtcaccgttgtgccatcctccgtcggtgttgagtcccggcagacgggatacccattcgttatagcaataatctacccaagtggaagccatcggcaattcaccgtatgtagcaaaagctgccatattcagaatacggaaagtcatctgccatacatgattgtcggcaatacggttttccagatgattcacatattcatgataaaacttatgggcgttttcgctgatcgtttcgagaagcaactgtttttcggcaggcgttaacagattgtaccatgcatcataagcggaagtactcatggacagaatcgtggagcggttgaaatctcctgcgaagtacttactgtctttccacgaaagaatttcggaaagacgtttgataccttctttgtagtacacttcgtctttcgtcagcagataagcgcgtaccatagcttctatgttcgcttcttcgcggtctactatcttgcggctttcccgaatcaatgccgagcgatattgtacgatgtttgtcaatttgactacttgggtggtatcgatttcctcctccagatgtttcaatggatgattgaggcatttccttgctttctgaatatagagctgcgcttccggattattcttgttccgctcgatgatctgatcccagtctttggcatcgagcaggatacggggatggctttgagagaacttcgccagcacttcttgcaaggagggaggattgaacgtacgtgtctgctcgtccacatagaaatgatagacgggcgaccattcttctttgccgtccttatcaaggtaggcgtgctgccaataccatttccctttttcaaagagtttgaaaggattgaagaaagcccagtttctttcggcggtcattacttccgatttaaactcaggatcacgtgcgatacggatgcggtatgtcacttccggtttgtgatcttcttcttccactccgtcaagcacaggtccgaggtgggggaacttatccggccacatgaaacgcggcggattgactgctatgtgctgaccgtctagtggagaaggtgtttcgcggacttcatgcatcagcgtctgctgactcagacgcaggatgcttttctgcgcatatccactataggaaagcatagctacaaataacaggaaaatataatatcgttgtttcatcatcttatttttttaagagttctttcagactgattgtcttgttgttgatcagcggacgtgcccagaaaccgatgaaggtgatatatcccacaaagagcaggatagacagcatacctgtacgcaaggacgtagcatctgccaatgtactcacaatcatcggcccgcctgctccacccacgatagccgaacataaaattccggcaaatgagccgtgatgctgtgaagccgagttcagcgccaatgagaagacgatagagtacatcatggaaatactgaatccgatagcaggaaaggcgattagcgaaacatccttgcttccgaataaagcggctagtaacagcactatcgtcaatacccccgaaacctgtagcaggcgtttgctgtcaatcagtttcagaagaatcattccgaccagacagcctgccgtcatcagtccccagaagtagctgactgcctgcgcaccttccgcctgcgggtttacaccgtgatattgttcgaggaaggtactcatgaagatagaggttccttgttccgtactgacatagcagaagattcccagaaagaacaaccatacatatttctgcttgaacagggcgaggtaggaatctttcgatccgcttttctcatcttctttcagttcaatcttcgggaaatgcgaaacaccgacggcaatcagcatcaccagcaacaataaggtaaatacccagtagagagatacccaaggcatatcttgtggcgtcatatccgccagcaagtcaaggataaggctttttcctgctgtataagtggcaggatcaagttcccgaatcagataagtatatgccaacgggcttaggaaggaggcgataccgaacataaattgtgccagttcagcgatgaaagcatagttttcttctcctcctacagtacgttggagcggattcagcacggtttgcagcattgccattcccagaccgatgatgaaagatgaagctagcaacatcggataagtatgcatacaggcgaacaggatggttccgataaacggcatcaggaatccacagaacaagacaggcttttcaccgaaacggtcgatcagtagtccggcagggatggacataatggcgtaagccagaaagaaggaagtcgggataaaccccgccatcgcaagatcgctcagattgaaattgtggataatgtccggaataagcggtcccagaatattggtaataaacgagatagtgaaccagaacgccataattagcgccagcattcctagatttttcttcataatcttaaataagttgagaaggttttctgctcttcatttaattcggttttctatttaaaaagagggaggcggcaccgatacttccggctttgttgcctaaagaggctgccatgatttccgtgttcacggcacagtcggggatggcatagcgaagggctttctcacttactttctgaatataaaagtctccggcttcggacagtcctccgccgataacgactctttgagggctgaagatattaataaatccggcaatgccgtgaccgaggaaatcacaatgttcgttcagcgactcagccgcaatcttatctccttgtttatagagacggacgatcaattctccgtttatttcttcattcggataagagatgccggcttcggctatccgtttgctgaaacgacggaccagtgcggcagtggaagcataatgttcaaggcatcctattgaaccgcaggcgcaaggttcaccattagctatcaaggggacatgtcccaattcagtacctctattggcgtatccgttaaacagtttgccgtcaattatgactgcgccaccgataccggttcctacagtcagaaagaccacatgagtggctccgtttccggctccgtacatcgtttcgccgagtcccatcagattagcgtcatttcccagttgggtaggaagtccggtctctttttccatccggtctgccagtttcagattttcccagccttgaatattctccgcacctcccaatacgatacgattcgtacaatcgacaattcccggtgtccctatcccgataccggctatcgtatattcctttgcttcggcaaaggttttcacttcattgactgccttgactaattgcccgatgacagcttcggctgatacgtcggcattcgacggtagcttcccttgaaagtgaaatacgccattattatcaataagagcgtatttcacagaagtcccgccaagatcaattcctatagcgtattctttttccatataactaggtatgttttaaattcgtttatactgtgccatgcttgtgccaccgtattggcacgcttgtgccaaaggcttggcatagcagtgccaacagcttgacacaactgtgccaacggcttggcacaagcaaagcaactgttttctttcatataccagtttatactctttctgcccagataggtgaactccatgcccattgcccgtcacgctggcgaacacgcacgtagtagtaatctgtatcacgctgaggctctttatcttccatatagtgttccacagtgaaacagctttcgggcatagcacgattgaagagaatcgcttcgctcagccagccgatcatgaagtgcgaacgtgagccttcgagcaattcgcccaatgtgtgttcaaacttcttgccgttgaaatcagcaatcacttttccgtctttcggcatctctacttcgaggatgacagcttgcatggcagcggtagtcgtattcggattcttgctgctgtacatatccagttcggtttctttttcgtctgcggatacaatgcggtttacgtgagtatggaattctgtttccccttcttgcggagaagtgaaggctgcaccgcggaaacatggagtgacgctcagaatgcgtcctttgtctacagacaatttaccttgccagtgtacatactgctcttcacggttccatccgaaatctactttcactttgcagcggacagtatcaccttcgggggcaaccggagtcaacggaccattcatgcgggccagaatctgaccgttcttgacgatatccacatagtcgatgcaactttctccggtaacattcagataaatgcggcggctgttgccacgcactacgtcacccatgaaagcatcgttgaggcggaagtcaatcaaaatcttatcgccggttgcggcgcatacgtggcgggtccgaagtgcttcccatatagcgtcgcgggttaatgacggagccagtacaccgatacggccgtcaccataactgcccggataacccgaatgttggtcggtagaagccataataccgaatttattacccagttccagaccatattgaatggttccttcccattggcgggggcccatatcgtgcaagtatggatagtcgccctgatcgctttcagccagaccgtgacgagaatacatttctacgaacggggtctggtctccttcggtaaagcatttccagttatagccgcgataaccaccctgatagcccatatggtgcggagtgatgaatactttgtgtcctttggccttttgtttccagtcttcgatggaagtgcattctacaagcggtgcatcgagatcgtagttcaaggcaacatggtcgccatgttccatgctgtgtgcttcatatccaacgaaagtgaggaattctccttctttattatattcgtttgtcatggctacgtacttctcatatccgccttcgcgcaaacgtttgaaagcaccggtatggtagtcgattacccatttcaggcgtggatcgtctgctccggggatatccggccacatggcgtggggtgttacacttacaaaatccaactgtcctttcgctgcttcaaaagcatcgcgcatatcgccgtgtccgtatgtgatgttacaatggttgtgcaggtctccccagtacattttgaggtcacttgccgatggcattttctttttggcttctttacttcctgccgcacaagagccgagcaggctgccggatgctgctagtcctaaaaaagaccagccagtattctttataaaatttcttctgtccatgatattattgttttgggttatttatcgattttccatcagtcttctgtctcctttgaaaagcactgtctctttttcatcgggatcattgtctttatattgtttctgagtttcttcaagtagttgcatcaactctttttgtttcttagcatattccgcttttccgaagatattgttcatttctctcggatcggctttcatgtcatacatttcccattcgtcaatgtcgttgtagaaatgaatcagtttgaagtcctgcgtgcgaatgccgtaatgacgttttacggagtgttctgccggatattcataataatgatagtaggctgctttacgccagtcggcaggagtcttgccttcgttttccaatactggtttcagtgatgctccctgaatatcagatggcacttctacaccggcaaagtcaaggaaagtgggggcgaagtctacgttcatgctaatggcgttgctggtgcttccggctttaatggccttcggataacggatgataagcggcatacgctgacattcttcgtacatgaatcgtttgtcaaaccagccgtgttcacccagaaagaatccttggtcggaagtatagacaataatggtattgtccagttcgccgatcttttcgagataattcagcagacgaccgatattctcgtctacagccagaacggtagccagataatcgcgcatatattgctggtatttccagctgattaatgccttgcctttcaggtcgcctttgcggtattcggcaatgcgctgtgcataggcggaatcccatttgtcctgtacttctacaggcatgcgcttataaacgctatacaggcggtttgtcgtatctttcagcatttcttcgcgagtgagcagttttaagtcccagtcattcgtcagcgtatgctcgatcgacatatcttgttcccgtgccgctttcccgcgtccttcgtagtcatcgaacaggtttgcgggttcggggaaaatagtattgttgaatatacccagatggcggggggcgggcatccagttacggtggggagctttctgatgatacatcatgcagaaaggtttgtttttgtcgcggttttcgaggaaatcgattgccttgtcggtgataatatccgttgcatatcctttttctacgatgtgctttccgtcttcccagaagtcagggtcgtagtagtcgccctgctcatgctggccgctgagtatgctccagtggtcaaatccctgcggttcgctgataagatgccatttaccgatcatggcagtctgataaccggcttgttgaagtagtttcgggaatgtctgctgatcaccgttgaaggtgcttgcattatcggtaaagccgttctcatggctgaattttccggtgaggatgcaggcacgtgaaggaccggaaagggcattgactgcataacaattgtcaaaacggataccctcattggctatacgatccatattgggagtctggatgaggttgccaccatagcaggacatagcttgggtggtatggtcgtcggtcatcatgaagatgatgttcggacgtttggtttcttcttttttctggttggcacaggaagcgaggcttagtgcagccaatggaagcagtaaggtagagggattgcttttcatgatagaaataacatctgatgataaaaaatgaccagtgaggagccgaggccttttccgtagcgggcatatatccgcatggaaatctggtctcagtgcctcgctggtcactggattataatttatattttaatgactgtttcttgccgtttactttcacttctatttccagtccgttttcatcgaacgttttgttcttgaacttagcgtcaaatttaggggcatctgcgctcttcttgactgggtaaataactgtgatgtaacgtaccgcattctcattgtctttctttacgttgaatgaaacattcatacgtttgtagcgcttgcgatatgcagtagaacaccatcccggctcttttttcatgctcatgccttcagggccgaagcattgaagtttcatgttgcttccatcctcgaattgagtcaggaatgtcatgtcttcgcggctgttggctatctcacctttcggcatctgatagtgcaggttgacagaacctttggcgctgcctgatacttcatctacaatgacaaagtaggtattgtctacgaagaagaccgaacggcggtgcttgaagttcttgtagcttgggttttctgtaaccaatgtctggatattgccttccggctgccacagtttagtaacagattcggttgtttccagatttttattgtccagagtcacggtgttgtgtacggaagtctgacggtgccagttgcgttgttccatcacttcgccttcacctgcatatacatacgaaccggagtcggggaacaggttcttgccgttaaaccacatttcgaaagtaccgttatccggctgacaatgccagaaacctttcggaccggcttttactaccatttgtgtagcatccattccccaggaattgcggaatacaaagaaacctgacttcaggaaacctttcgacatataatcaggtaatgcaccctctttgccgtctgttgccaaatacttgatagtttcgttttttgggaacagtttgctccattcacgatagttcttcagcatttcttttttttccgtgattttagcatcactgaaacatggatttgtgtaatccgggaaagaaatattagcatagaacatgatcatcttttcgatggtatccagatattcctgtggaaattcattacggaatccgttaacatctgcaatacccagtgccttgcagaagatattgatagcagcaaggtggtaatgcgggtcaagttcaaactgaccgccatcgttgtaaacctgtacgtttatttcacggttcagaatgtcaataccactttttctccaggccggagcttctttaaattccgggaagaatgcacctgcataaatcatacgctgagcttcgaacaacaagtgattaccctgatcagagtaattagccagaatatgtacggcatgtttatgatagttcaccagaaattcagtcaggaaatccggagtgaaagaaggagaggggaggaacaactggaactgtgtagtctgatcctgcagacgattacttacttccagcggacgccatgcgaaacgtacattttccacttcgcctttaatcttaccgtcacttaccagttcatattctttcttgtccatcttcaccaacggattctttttgatccagtcgatgtattggtatgcccattctttggcatatttctcgtcacccgatacacggtatgctttacccatcggagtaaaccatttatgacggtgcaactgccagcggagttcattgtctttcaccggccagtattgccagttgatatcttctccgtagttgtaagaaggctggtaacctttgtgaacaaagaatgtatgtttcaatccgtcgtccgcccattgctgttcttctttgccgatagtgatctttttcagattaatatccggagtcttcacattcgtacgtgcacggtagtagtcgagcagtgcttttgcggcatcctcatctttgccttcctgatgtaaggcttttactttctccaatccggggtagtccaggttgagaagcgagaatacctcgcttttcaactcttgggcataacctttgcctacgaaacaagcaaatgtcagcaggacgatatatttcagagttttattcatgatatcatttattattctgcaaattacaatttagatttgaattttctcagctatgttactcaataactttcacctctccattctccaatctcaacttcttcaagtccatgaatctcttcaatgcttccaaatagtagtagtcagcataattcagcggagtatcgatttcagaaccgttaggcaatgatccgacagagtgcattaagatgaatccctggttttcgccgactttggcaaggtatgcgtcgcttgaaaggcttttcagaattttttctgcataatccagatatttctttccgttgggtaccattgtgctaagttcaatgaatcctgcggctgttacagcagcagccgaagcatcgcgtggagtctcttcggtgacaggagcatcgtagtcccagtaaggaattgcatcgtctgttttcacgcgctccatgatcatgtcggctatgtttacggcaaagttcaggaaggtagtgtcatttgtttcgcggtagcaggaagtgtatccgtatacagcccaagcctgtccgcgcgaccatgaagaatcgtcgtttttaccctggtgagtctgtttgcgttctactgtgccgtcgttgttatagcttactacatgccagcaagtatagtcaggacggaaatgatttttcatcgtagtgatggcatgcttgatagcgacatccttgtatttgttgtcgcctgtccatttgcttacagtgaacagaaggtccagattcatcatgttatcgatgattaccgggaagttccagctgccaaagtcccatgaacggatggctccgattgaatcgttgaaacgtccgctcaggttatcggcagtttctttcatgacagctttgatggtatcgttaggagccagacgctcagcgtttccgtagctgcagttgatcataaatcccaaatcatgtgtacctttataatagcgtaccggattcagcaggtttgtatattgaatggcatccgctttcagtgtatcatttccggtcagttcgtatgcgtaccacagtgatccggggaagaaaccgcttgtccagtcgtatactacacataaacgacgtttgcccatttgttcggcagtaggttgcggacgaagtgaatcctgaaaagtggaaggatctctttctaattggcggcagaggaaatccatgtcatatccagtgcggattgaacgtggaagcttaccggttccgtcaatttcttctgctgtaagttgtaactgggcagaagctacatccagccctttcttaatccaactgt

SEQ ID NO: 4579 - DNA, 987 bp, Unknown
  gut microbiota DNA sequence
agcaatgaaagccccagtggggcttttaagcgacagaacggtcttgcgtagcaagatggaggggtcttaccccgacaagttcacctgacactagtgccgggatcgcattgggctgtaccacatcccgcaaacgcaattcgccgatgtaccggcgattactcagcatccgctgaatcgtattgtaggacatctccccgcccattgaatttttgatgttgtgtgcctttaaccaatcccgcaggtcagtcatggtcgcaccgtccgcatacttctggaacgcctgctccacatacggagccagcagcgggtcgggctggtaatgccgggtctcatcgatcatgtatccgaacggaatcgtgccaccattataaatacccttgagagcattctcggtcatgccacgcacgaccttttcagacaggtcagccgagtagtattccgcatagccctccagaacagactccagaatgatgccctccgggccagccgaaatgacttccgtagccgataccagcttcacaccattgcgtttcagctgggtcttgtaccgtgcgctgtcgtagcggtttcgggcaaagcggtcgagcttccagaccagaacgatgtcgaacagctttttgtcgctatctttataaaagccgccatcattctcagatcgtccagttctggcttgccgactgcagatccaccatgtgggcatacagtcccttccgggcgtacagctctgccgggctgccctgctcggccacgatgccacccgacagcaccaccacccgatccgcaccggctacggtgcgcatccggtgggcgatgatgaggacggttttgttctttatgagccgggacagagcctcctgaatggcagtttcgttctccacgtccagactggcggtggcctcgtccaacagaatgatgggcgcatccttcaggaaggcgcgggcaatggaaatgcgctgacgctcgccgccggaaagagcacagccattc

SEQ ID NO: 4580 - DNA, 33617 bp, Unknown
  gut microbiota DNA sequence
atatctctctatggcgtgtttccggctcatcagtatttgccagcggtatacccagcaagtggtgaggaaataaatgcctgcttgtatccacaaagctttatattcaaaggcgacttcgcttaaggtagctcccatattattgatcttcacaaagccattgatgccgaatgtggacgggaaaatgtaagaaacatatttccagaacggaggaatggcagctcccggccacgaaataccggaaataaacagcaacggtacggaggtgaatacaaaaatcagcatacaggtttcccggttgcgaatggcgatggaggtggtcattgcaaagaaaatgcaggctgccagatagggggcgacgaataatactagtgaaccgggttgcccgatctggttgaggctgaatagtcttggcacgatatgcagcacgtaaaatgataccagtacgtacacaaggaagtaacttagccccttgccaagtacaattcgcaacgttccgttataatgccggttgatgggtacaaggtctttaaaccggttgttttcccgggcagttcctgctgccagtccgattccgagcaatagcgtctgctgtatgatcagcaccaatacggcaggaatcaggaaagcggcaaaacccgctgtaggattaaagatggaaatctcttcatattctatcggataaccggtgatttcgtcctgtcgctcggtcgtgttcccgctacgcgcgatctttatatctttattcatatccagtgatacggccgtattggcgatcagcatggatttatagtacagcaatccgctcatgtcgcaatagatactgacttgcgtctgtttccctttggcgatgttgtcgctgaaatcagatgggatatagatgatgccgtatgcaagccggttcttcagcatttgtttggcttcttccatatcggcacaataggcaacaatctgaatgtccggtgtggcatccaccttccggagatattcgcggctcagggatgaatgagagtcatcgactacaacggccggaacttctcgtaccacttcattgtcatagataaagctgtacagtaacggatagcccagtgggacgaggataaagaaaatcagtaccccctggtcgcggaaagttgtctgaaactcgcgcttccagatataaaacaggtcgttgatgccttgggctatcttgtctttaaattttatatctttcatcagggtatgtatttatagtaaaccaatgcttctttcaagcggtgaaccacaaagaagggaagcatcatgaatattaataatgccatatagttggaccatgagtaagccatgctgtatccgttgagcgcctgatctacataaatcaggaaataatgacgtaacggaaacaggttgctcaaggcctgcaaaacaggattcattgccatcaccggaaaagaaaaaccagagatggagaatgaaatcactccccacaaggaggcaaaacttaatccgaggcggagtgtaggcagtgtacctatcatgacgatgccgcaacactgggatgccaatacaaggcagagcgtggcgaatatcatcgggaagatgccactgttgcaggggaaatgcagaaaaccatacaggtatacattatagaatatccccattatgaaaaagaccaccgtatgcggaagcagtttgcctgccaaagcaatgtaaatggaattgttactcattcgcaaccactcacgggcagtgcggtctttgatttctacaccgatagaataaacggtgaccatgaagatgagcagcatgagtactcccggtatcagtgtattgcagaggtataccgaatagttcagccacggattgttcagtggatgcgtgtcaatcacgatcggttgcaggaagcccattgcctgatcttccgtagctcctttggcatatagtacgctccttgccgcagagccggcggtgagttctcccatcattttcatgtctctgaatagtaaagaacccgcaatcagataggagtaattggtgtagaaagagattttgggctgccgttggctttgtgcctctgccgacaagcctttcgggatatagaagaaaccgtagatcttgccttcctgcacagcgatacgcgcatccgtcacattgctgtaatgagctacgacacctgtttgcgagaaagcatccagattgcggacaatgttgcgtgaagtagacgaatcatccatgtctaccacgcccgccggaagattctgcggaagtcccgaatccatcagggtcgtgaaaaataggtagcagaacaatggagcgatgaccatgcaaaagagatagagcgggcgtgatactaaccgcctgcactccctctgcatgacttgccataaggctacatatttcttctttctctctttcatgattatttgttaatgataacggacatacccggacgaagattttccactttttccatcggagaagctttgacttcaaatgtcttcaggtcgaactgaccggtagttttggttgctttccaggcggcgtaagtacctaagtctttcagatagtatactttgagtctgactgttttattatccagcgcggggacaacagcttcaaattctgctcccatagtcaggtttttgagcaagtcttcgcgtacgttgaaagttacccacatatcattgagttcggctatgttcatgataggagcacctgtgcctaccagttcgcctactttcgggaaaatctcggaaacttctccggcagccggagcaatcagataggtttccttaatgtaagattctacttcggcaacagctcctttggcacggttcaccaacgcttcggcagccatcttgtcttcacgttccgcaccgttctttgccatagtatattgtgctttggcagctttctcagtagcgatggcagcgtcgcgttgtgcggttacttcgtccagcttttgtgcgggcatcactccttgttcatacaggttcttgactctcttgtatgatttctcggcaattgtaacaccggcctgagctttctgccacatttcataggctgcctgaatctgttcctcacgtgcacctttgattgctttttcgttttgtgcctgagcggcagcttcggcggcacgtgcctgctccattttagccactacatcgggggcttctagaatagccagtgtatctccggcatttacgctttgtccttctttcacacgaaattccagtatacgtcccggaactttgcttgaaacgcggtattcggtaacttcagcctgcccctgaataatttcaggacctttgcggagcatgaaaaagccaacgactgcaacgattgcaataactcccagtaaagtaagaaatgcaagcagcatattgctgttttgtgattttataggtgccatattattgatgaattataaattacgaataataaattgattgaatacctcagtctttaattgtcaatagtcaactgtccattatttcagcgttcccaaagacttcttcagataaatctccgtcagcttcacgtcgatttgtgcgtcaatcttttccgattgggcggacagccatgctgtttgtgcttccaggacattgctggtggcaatgaccccttctttgaagcctaaggtggcataacggagattttcgtcagccttttccatattcttggttgccattaccagttttttgctggcttcctttactttaaaagcggattggttaacttgcaattcgatcttttctctcgcatcctgaagctgatattgtgcgattcgtgcttctgccttggcggctttggtcttgtaaatgccttccccccaatgccagataggtatctgtaccataacgcccacattccacattcctttgaatttattctcaaagctgttgaatacggaaggattggtcaccatataatttcccatcaacgcaatggacggaagatgttcggcgcgggtaacatttattttctgtttataaatctgagtagccagttcaagactgcgtatctccggacggttggcgtaagcggtggacatgtcgaagtgggtctctggtgtgagcagtggaatgtcctccatattttcgtctgccaacgtgataggagagctgagatcaatgccacatagttgacacaacaacattcgggccaggcttaatccgtcttccactttagtcagtgtcatttccgcttcgttgactttcacacgtacggacaaaccgtcggcttttgtggcaactccttcggcaatcatcttttccacatcgctgtccagctgctgcaaaagtttgagatagccttcggccagtttcttcttgttcactaaggatatgacttgccagtaagcctggtcagtgctcatgataacctcctgcatgcctccttgatgttgctgttgcgctaattcttcggcatactttgtgattttattatatgcacggattttgccgcccatgtataatggctgtgtcagcgtgatggcacctgcatatacatttcttgtatctgtgcggagcgcattcaccagtgagtttcctgcctggtcgagggcgggcaaggcagctcctaacttttcacttaaagaagcgataagcggtctcaactccgggtgtgcggtagcaatctctgtagccgtctgttgtatcggaccggccaaattggtccccaatcccgaaagcgccgctttctggtcattgttcaataatgaaaattctttttgatttctcatgtaagttcccgtagccgagaaactgggcaggtagttggtaaatgcagctttgtgctgataatgagcggcatttattttttcattgcttatcaacagatctttgttgttggcaagagctaatgcgcggcaactatctaggcttaggaagctttgcgcttttactataaaagtcaggctcaacagaattgtcagaagaaatagttttttcatcgcatcttacatattaataaggtgatacttcttttttaaataaccccgttatcatataaattgtttattgaaatagttcatttttttgtacttgttaacttaaacaataattgcataaacaacgatgcaaatgtatgtgctttctgtgaaaacgcaaaatgaattagctttttttaaatgcttctctttggaaaatatgctatacttgcattttgaaacatgataaacatactataatgttattaaatctgacagaagaacaaatcactcaactcgctccggacgctgcgtctgtcaaagcaggaaaagggctggcgaaccggactaagtgggtacttctggagcatagtgaccgcgccatctggggacactgccaaggaagtggaaaaacgccttatcaaacagtagttgatacaaagaatattgcattcaaatgttcttgtcccagccgtaagtttccgtgtaaacatgggttggggcttttatttatgtatgcttcccgtgctgatcttttcaaggaagcggaggaaccggactgggtaacggcatggctctccaaacgtgaagagaaggcggagaagaaagagcagaaagagaaatcggaaactccggtggatgaagcggcacaggccaagaggcaggccgtgcgtcatcagaaggtattggccggaattgatgatcttcagatctggatgaaagacttgctccgcaacgggctgctgaatatcccggaaagagcacatacactatttgaacccatatcccgcaggatgattgatgcacaggctggcggattggcgggcaggttacgatcgctacaggaaatcaattactatacagacagttggaaatatgagcttaccgacaaattgagtaaactgtatcttctgacagaaagttataaaaatctggattctctttctgctgagtggcaaacggaaatccgtactcaggttggatatccgcaggcgaaggaagaagtgatgtccggcgtaccggtggcagaccaatggatcgttttgcataccagaagccggaagataaatgagctgcggacagaaactttctggttgtacgggaagtccagtcaccgtatggccctctatttaaactttctggctcccggagcgttgccggaatttaatctggttcccggtggcgtctatgaaggagagttgtatttttatcagggcgttgctgccttgcgtgccctaccccaaaatatgaaatggctggatagtaccttcctgccttcattgtgtgccgatataccggttgccatgcaatcttacagagcagttatacagactcatccgtttgcggaggaagttcctctcttggtggacaatgtcagactggtaacaagcggaaatacgcactatctgcaggatgccggaggcgtggctgttccggtgcatatcgaagagactgcacgtgttgatatactggctataacaggcggaaaacccttctcggcttttttgctggcagacgccgtttcctgtgaattgaaaacaatctggtatcaatctgaattttatttttggaaagatgaacttaactgatcatatcatcaatgtggcattgcttggcactgccacccgtgaactgataacgactgattttccggaagagttgcaagaagccctccgcgacattcaggcgaaagcagaggatgcggaagctctcttctatcagcagtccgctttgggctttgcctttgcacgtgccggagtggaggcgcaatccattgcaggagttacaaatgtgacagaagctccggaagaagacaaaccttacttcctccgtgaagtgggagagttgcttacttccctgtatctcaataaaaatcagtatcttttgctgtatgcttaccggagagctgccgacaaaggaaaattgatccctcctgcctatctgcaaactttattgcgaagagcttttgaccggaataatccctacaggtatgaggaacagcactggctgtctctgctggcagggcaaagaggacgttggcttcttccgcaaatgggatttcctgtatggggagaatccggcaacgaaacttgggaaactgcctctcacgaagaacggaaacgaatgttgactaacctgcggaaaaatagtccggagcaggggcttgccttattgcagaccgaactgaagaatgagtcggctgcccatcgggatgaactgattcagtgtttgcggtgggggttgagtaaatcagacgaagcattcctgcaagagatcgtggcgaccgatcggagcagtaatgtcaaagaaacggcccggcgattattgtgtagcctgccggactccgaactggtgaaaatatacgaagaattattgcgggggaaattacatttcaatttccttttgggatggtcgtatgataagattgaatttacccctgaaatgaagaaactgggacttgaagaggtgagttccaataaaaacgagaaggatgatcgtttcttgttacgccagttggcggaacgtgttccattaagtttctggagtgagttttatgactgtccgccggagaaggctgctagcaaactggcgaagaaccctccttttcagaaactgttcgacctgtcgaaaccgatcctgaatttcagcgactccggttgggcatatcataccttgaaggagaatgcggatgaaaaaatggcggacgcgttgatgggtttattgccttcctcccaacgtgaggaaatagcttttcagtcagagagaggcggctatattccggatagctggttcaacgaagacggcactggatggggaatgaaattctccacccgtgtattccagcggatgcttcggaataattactatctccctaaggagacagccgaacgactggcattatacttcccgtccgagatgagaaaacccatcgaacagacagcgctttcaatggccgcacaagagaataatacctccacccgtttttcccggttgatgatggaatacatggatttgaagcagagaatagataccttattaaataatgactaataaaaacagaaagaagatatgagcactttattaaggcaacatgctgaacagcaatttgcagaagaacttcacgagttgaaacagaatgaaacaaatcccgttccggagaattgggagatgtctccgcagtcagtggttacctacctgatgggcggtaaattgaaaaacggatttgaagtttctcctaaatatataggtaaccgtcgtctgatggaaatagctgtggcaacccttgtcaccgaccgtgcgctactgctttacggactgcccggaactgcgaaaagctgggtgagcgagcatattgccgctgctatttccggtgattccactttgatagtgcaggggacggccggcaccggtgaagaagcgatccgttatgggtggaactatgcccgtttgctggcggaaggtccgagtgtgggggcattggtgcaaactccggtaatgaaagctatgcaggaaggtaagataggccgtattgaggagctgacacgcatcggttccgatgtgcaggatacactgatcaccattctttctgaaaagacattgcccattccggagctgaatacagaagtacaggcaatccgcggtttcaatatcatcgctactgctaataatcgggataagggagtcaatgatctgtcaagcgccttgaaacgccgtttcaatacggtcattcttcccttgccggattctattgatgaagaaatagatattgtgcgccgacgggtagagagctttgagaaagtaatgcagctcccggctgaaaagcctgctttggaggagattcgccgtgtcgttactatcttccgtgaacttcgtcagggcgccactgccgacggtaagacgaaactgaagactccgagcggaacgcttagcacggcagaggctatttcggtggtaaacaatggactggcgatggcaggttatttcggtgacggagaaattcatgccgaagatctcgtatccggtattttgggtgcagtggtcaaagaccccgtacaggataaagtcgtttggcaggaatatatggaaacggtcgtgaagaatcgggacggctggaaagatatttaccgtgcttcaagggatatgatttaaaaagaaaggaagaaatggctattcatttactaggcatcaggcatcacggtcccggctcgtgccgcaatgtgctgaactacttgcaggaactgcaaccggatctgattctggtagaaggtccggcagaagccgaagcgctgctggcctgtgtggaaaatccgcagatgacgcctccggtagctttgctggcataccagccggacgagcctcagaatgcagtgttctacccttttgcggagttctcgcccgagtggcaggcgatgcgttatgccgtacagaaccggatacctttccgctttttcgacttgcctctgatctattcgctggctcttcggacagaaaagacctctgaacaggagacggaaacgaccgctgaagtcgcagaagccggcgacccgttcgactggctggctcatgccgcaggatttactgatggtgaatcctggtgggaaactatgattgaacaccggcaagaacctgccgatatttttcaggcggtacaagaggctgtgactgctctccgggaagaacttccggggcacacctctccgcgtgacctgatacgtgaagcgtggatgcgtaaaatgatacgtgcggcacagaaggagaatttcgaacgcattgtcgtcgtctgtggtgcatggcatgtacccgcactggacgatatgcccaaagtaaaggacgataatgaactactgaagggacttcccaaagtaaaggtagaatgtacatggattccgtggacgtatgaccggcttgctttccgcagcgggtatggtgcgggaatcgaatctccgggctggtatcattatctctggcatcatccggaggatgatggcacgctttgggtgagccggatcgcctctctgttgcggcagaagaatatggatatctcggtagcccatgttattgaaaccgtccgtctggcacaggtgacggctgctttgagagatctgccttatccttctctgaatgaatataacgaagctgtcactacggtgatgggcttcggagatgatattttgttgcagattatcaaagaagaactgatcatcagcaaccgcttgggaagtgtacctgatgacgttcccaaagtacctctgctggtagacgtggagaaaatacagaaacgtctgcgtgttccgttcaccgccgagatcaaagaactgatattagacctccgcaagccgaatgatctggagcgaagtatcttcttccatcgcctgcaactgctgggcatcgactggactatcctcggacggatagacgggaaaggtactttcaaggaaaaatggaccttgtatcacaaaccggaacaaatcatccaaatcattgaacaggctatctggggaaacacggtgatggaagctacgcagaaatatctgttgaaacagatggcggagattcagcatatcccggaactgacagctttgttgagtacggtcctccccgccgatcttccggcgctggtagaagcgatgaccgtacagttggaccgtctttcggctgcttctaccgatattctggaaatgatggaggcggtccccgatctggtgaatatcgtccgttacggaaacgtgcgtgatcttgatttctcgaaggtcggtgatatgctcgaagccatgattgctcgtattcttgcgggtggtgtattggtgtgtatcaatatcgatgaagaggctgccggtgatcttctgaataaattggttgccacggactatgcgctctccattctgaatcgggaagaactgaacctgatgtggcgcaatttcatcggtcaggtacgttcttctgccaatgtgcatccgttgttgtccggttatgctacccgtctgctgaatgacaaaggggaaatctccgcagaggagatggagacgacacttagtttttattcttctgttggcaatgctccggcagatatggtatactggttcgaaggctttttacgttcatccggttcgatcctgttgctggacgaccgtctctggaatttggtgaataactgggtatgttcgcaggacaaagaaacatttatggaattgttgcctgtattgaggcgtactttcagcgaatttacctctgccgaacgccgtaagctgggtgagaaagcccgtcgtacggattctacgggcacatcatctgccgtaggagcttcggtaacggagaatgagtgtctgaatcgggaagaagcaaagaaggtaatccccgtgattcgtcaattattgggactggaaacaaagtaaaggaaagaagatggaagaagaattactgaaaaggtggcgtctgatactgggcggcgatgaggctgacggtacaggcgtgacattgaatctggaagaacagcggatagaccattctctggaagctgtatatgatagtgacagaagaggggggctgggttcctcggctcccaaagtaagccgatggcttggagatatccgtgagttctttccgcagacagtggtacaagtgattcagcgggatgctataaaacgtctgaatctgaccagtctgcttaccgaaaaagaaatgctggaaacggtcgtccccgatgttcatctggttgccaccctgatgtcgttaagccgggtgattcctgaaaagaataaggagatggcacgccaggtagtccgcaaggtggttgaggagttgcttcgcaaactgtcggctcctacgcaacaggcggtaaccggtgctttgaaccgttccagccgtcgcaggaacccgcgttacaatgagatagattggaaaacgaccattaccaagaacctgaaaaactaccaaccggactataagacgattattcccgaaatccgtattggttatgggcgtaaacggaaagcgatgaaagacattatcctgtgtctggatcaaagcggttctatggggacgtcggtcatttattccggcatattcggttctgtgttggcatccattccggcggtatctacccgtatggtggtttttgatacggcagtcgttgatctgacggatgatttgcaagatcccgtggatctgcttttcggggtacagctcgggggaggaaccgatatagcccgtgcgctgacttattgtcagggagtcattacccgtccgcaggacacggtgatggtgttggtgactgacctttacgaaggaggagactccagagaaatgagaaagaaatttgtctcgttggtcaatagcggtgtgcagttgattgcccttccggcgttgaacgatgacggtgctccgtcctacgacaaggggcatgctgagtttctcgcttccataggggtgccgacatttgcctgtactcccgataagtttccggaccttatggcggctgctttgagtaaacaggacattggaatgtgggtttctcagaatgtaaagagtgaatgacaactattggatagaaaagaaagaaggctgtccctcatagcgaaggacagcctttcttagcttatataaatgtaaggggattgctaattacagagcgcctacttctttcaaagcggcgtttgttccgtgaacagcttttgcgctggcagcgaacttagctttttcgtcagcgttcagatccagttcaacgatcttttcgataccgttcttgccaaggattacaggaacaccgatgcaaatgtctgattcaccgtattctccttccagatatactgaacaagggatcatcttcttttggtcgtgaaggatagattcaactacgaatgctcctgctgcccccggtgcataccatgcagaagtacccagcaacttagtcagagtagcaccacctaccatagtagcagcagccacttcgttcagtttttcttcagagatgaagttagttacaggcatacctttgtaagtagcgaagcgagtcaaaggaatcatagtagtatcaccgtgaccaccgataaccataccttctacttcgttggcgttgcagcccaaagcctgagacaagaaatatttgaaacgagagctgtccagtgcgccacccataccgatgatgcggttcttcggcaagcccagagctttcaatgacaggtaagtcattgtatccatcgggttagagataacaacaaggattgcattgggagaatatttcaagatgttttctgccactgatttaacgataccagcgtttacaccgatcagttcttcgcgagtcatacctggtttacgaggaatacctgaagtaattacaacaacgtcagagttagcagtctgagcatagtcgttagtgcagcctactacagttgtgtcgaaacccaacagttgagctgtctgcatcatatccattgctttaccttctgaaacgccttctttaacgtccagcattactacttcgtctgctacttcattgaaagcaagtacatttgcacatgtagcacctacgttacctgcgcctactacggttacttttgacataatactatatatttaaaaagttgataatttatttcatgctttttagcgcgacaaaattacaacgataatcctaattaaagaaatttttccgtaataattttcgttaaagaaaatgcccaagactatgttactctgttacgaaatgattacttttgtgcccgttatcgattaacaattggaactatgaacaaaaaaagccttcttattgcagctgtagctgttttggtgatagcgattatcggcatcacttatttgttgtttactgaaaagaaagccaatcgcgagctggtacaggaatttcagttggataaggaagatttggagaatgaatatagccagtttgtgcaaaagtatgatgagttaaagtttacggtaactaatgactctctcgcactgttgctggagcaggaacaattgaaaactcaacgattgctcgaagaactccgtaccgtgaaaagctcgaatgcaacggaaatccgtcgtttgaaaaaggagcttgccactttgcgtaagatattggtaggctacgtcaatcaaatagactcactggacagaatcaataagcgccagcaacaggtgattgcagacgttactcagaaatacaacactgcttcacagcaaatcagtacactttccaaagaaaaggagaatctggataagaaggtgacactggctgcccagctcgatgtgaccaatatccgtatcgaaccgcgcaataaacgggggaaggttgcaaagaaagtgaaagacatcgtgaagctggctatcagctttacagtcgtgaagaatattacggcagagaatggcgaacgtaccatctatatacgtatcaccaaaccggataatgacgcactgaccaagagtgcatccaacactttctcttacgaaaaccgtacactgacttactccatcaaaaagtatatcgaatacaacggtgaggaacagaacgtgaatgtattctgggatgtagaagagtttttgtatgccggaaactatcgtttggatatcttcgagggcggtaatctgatcggctctcagaagtttacgctggactaaccgatataaattcaagaaaaaaatgcgccaacaagcagtaaaaggctttttggcgcatttttctattagaaaaaggttaactttgtgaaaactaatagaataatgcgtatgaaaaagcacttgactcagctactactatcattactgtttctggtggtgacagccatgacttgcgatgaacaggattgggctgaaccgatagatgttccctgtactttgaaagaagtggagttatatcattgggataatgcaggtgagaaacctaaggaggctgttgataacaaagttctcaaagaagcttatatgatggagattcgtctgctgacagatgcgggggaaaaagatccggaatcttatgacgccgatcattatcttcgccatgtattatcggatggcatcaaaaagattcagatatttacggaaacagcttttaatgaagaatttcccgcaggagcagaagtcacttcctgcttttatgactatccgaagacgtttgttaaagatcagcagacagattatactgttaatggaggggttatatccatgatagatgaagtaaataagatatataaggcgttattgaccattccccaatcaggcggagagttccgttttcgtgtagtgctgacgatggaaagcggtgaaacggttgaacggctgagcgatccggttactttctattaaatctgctgtctatgaagaaaatacatttattagccatgctattgtttactgcatgtgttgtgcctgtatcgcaggcacaggaaagtctgtttcttaaagatccatctaccaagaataagttgctgcagttagacttggatgtgggaaccaactttgacctggcttatcgggggaagggaaatatgttcactgcaatgtcggatcagaaatctgtatttcctgctatcagccttcgtttgcaacatttcttttcgcgtaaatggggatggtatacgaatatccgtttggggattcccgtgaaatataggcgagattgttatactgaattagcccatgcagtcgaagcggattactatgtgaataatctcataccgggaacgcaaaagccggacgttaatccctgtctggattttggtgttgcttatcgctttgaaaattcccattgggctttttatcctcgtttggggattggtgtgaatagcatttcctatcagcgtgtttgtgcggaactaaagaaaaaaggaggaaatgaattatataagatagagtatagaggggatgatgaaagtaactatggtagtgagagtatcgatgcttttattctttcggcaggtattaccgccaactataagctcagtcgaaattgttttttactgttgaatgtcaattatatacagccattggggagatttacttatcgtaaatatgtaacagacctttatacgggagaaaaggtggagagaggagtctataaaagttctacattcgcccgtgatctgaatgtaagtgtcggattcggattccctttttatttgggaagaaagactaatagaaaatcatcgcatagagaaagaaccaggcagctaatggaacagaaacggaaaacatacgggttgtttccgggaaataagtagccatttaatcatttctttgcaatgatgagcgaatagaatttagcctttatacaaagtttgaaaaagaaaaaactctgccattcacaacaattggattaacattcttatgatatacttacgtgtcagctagtctctctataaaaataaaaactataaattgctgtcatctgtcactttgttgggtctaatatcttgaatatgagtgattaatgaggtgacggcagtaggtgacggcagtgtgacggcaaattttgctgtcacactgccttgttttcaatggttccttatggtctgtttgtagttctatatagagctttttagtttctcccgtttgaaacttttgtttcttcagcttggaactaaagtttcaaagccttgaaaccaaagtttcggacgcttgaaaacattggttccagcgtatggaaactagttatactagagtgtatgatgtcaaaagtcaatagtagcgagttcagtgtagtcgatgtgcgtgtgacggcaatagttgtcatcaccgtgccgccacctgttgccgtcacagcgttaagccttgactatgagtgtgttatttgtgtttttgtgatgggtgacagcaataattggataaacaatacatagagagagaagccggttgatacatctattatgataggatttatcagattgataatcgtttaagagctttttaggtgccttaacgacaaaacaagtggctgattgtgttatattctctaagtaaccaaataaaaataacaagattatgaaacagaaaagagctaaaattggatttaccggatgtgccaaagcgtatatccggagtttgcaggaagaagggcgctattctacggcacatgtgtataagaatgcggttctttcatttacgagatttcatggcagtacgtatattgcattcgagcagatcactcgcgagtctttgcgacgttacggacaatatctgtacgattgcaaactgaaactcaatacgatctctacctatatgcgaatgctgcgctgtatttacaatcgtggtgtggaaactggtatcgcccgttttatcccccgattgtttcgtgatgtatataccggtgtggatgtccggcagaaaaaggcaatacccgtaaaggaactgcatacacttctttataaaacaccccagtctaagcacttgcggcgtactcaggagattgcccgactgatgttccagttctgcggaatgccttttgcggattttgcgcatttggaaaagtcggcattggcacaaggggtattgagatataaccgtatcaagacaggcacttctgttagtcttgaggtgctggagtcatctctgccaacgatcagtaaacttcgcaataatgaccctgttcgggaagatggaacgaattatttattcagtattctgagagggaataaaagcccaaaaggtgaaagcatgtataaagaataccagtcggcgcttcgtcggttcaataatcagctgaaaagtctttcaagggaacttcacttaaagtcggctgtcacctcatataccatccgccattcttgggcaacgaatgccaaataccagggtatacctattgaaatgatcagtgaatcattgggacacaaatctattaagacgactcaaatctacctgaaaggttttgaactggaaaagagaacagaagcaaatcggttgaattgtttttacgttgaaaactgcagtaattagaatagaatataatcagagtgctggctattagtgtgttatcatgtctattacttcttaggtaacggaaataaatacgacgcaaagatatataaaaagaatctcatattccaaacttattatacattattttatttctctgacttaagaaaataaaataacactatgagaacacgaataccactgacttcatgttccgaacccttattgtttgtcatccgacaaaatctccttcataacccttttatacagtgcttctcgcaaaggccgctgcctttttcgcttcttttcccctatgtgtaaagtccggtaatggacttccgttacctaagaagtaatagataaatgtaagtagtaaattgtgacacgcaattcaaacaacaagctcattttgcatgccttctatttactttggttctgaatttatccattgggatatatgcttgtaaaggtacacacacagtgacaaaataaagagaatgaacattgcttcgatgtgggcaatgtcttaaaaagggtttttagtttacttatttaaaagtaaaagaagaaatggaaagtttatggaaagtctggttctccagaaggagaaaagtgtatgttcggatagcccgtcaatatggttccactccgtggcgggtgtattatttaggacatggaggcaggtgcaggtcgctcaaagacatgcagatattggaagcgttacagcggcagggagttatttcgcatatttacccttggtgataattgactgaaaaatacttgaacatatttaattatgtgtccgacagaaatatgaataattataaaatatggggtgagatgtttttctaaaaaggttactgtgaagtacccgaacggggataaaccctttatagcatgtgtatgtttcccacaacatgcttattgcttatataaacggagtctcttggatgtccgttttatataattgtttgtttttgtttaagtacattctgtcctggtgaggaaggatgtacttttttatgcccgaaagtccggaatcagatagttacgaaggtccggtcggaagatcagcgccttccgtccgctccccacatcatcttgctgcggagggtatcgaagaaaatatgattgaaccgtttcactacttttatactgtagtctgcccggtgaatggtcagctgagttgtctccttgcacgtttcgctgctgccgtcgatggcaacgaggaagttatggctgcggctttccacgtccagcgtgatttcccagtcgtcacgaatgacgataggacggacgttgaggctgtgcggagctaccggggtaatggcgatcgtattggaatgaggaacgatgatcgggccgcctacgcttaatgaatatgcagtagagccggtaggagtggcaatcaccagtccgtctgcctgataagtattcagataagcaccgttgatcgcagtgcggatgctgatcatggaagaactgtcccgcttgagcaccgcaatttcgttgagggcataaggcgattcctggagatttctgtcattgcagataagctgcaatacacttcgttcctccacactgtatctgcctgcctgaatctcttcgaaagtcacctccatctcttcgggtgaaacatcggcaagaaatcccagtcgccctgtgttgatgccaagaatggggatttgttttctacccacccggcgggcagctttcagaaatgtgccgtcacctccgatgctgataaccatatcggctgtgaagtcgttgccttcgagcagggcatcgacaggcacttccatttttaaatctgccgtcaggaactggtaaaactcccggcacatacagatttccgctccctgcttcttgagaagctcgaacagtctgagtgcatgcaaagactttttaggctgatacgtatttccgaaaatggcaaatttcataagctgtttcattagtttcggttgcaaaattggcattttttcttggatttctactttaaataaccaaaaaagaactgagaatgcgtttcgtattattaggcaactaataataatatttgtatttttgcggcaaatattgcgtaaaactatgactaaattaagtgtaaacataaacaaggttgctacattgagaaatgcacgcggaggggatacccccaatgtggtgaaggtagcacttgattgtgaagctttcggggctgacggtattactgttcatccccgtcccgacgaacgccacatccgccgggcagatgtatatgatctgcgtccgttgttgcggaccgaattcaatatcgagggctacccgtcgccggagtttatagacctggtattgaaagtgaaacctcatcaggtgacgctggttcctgacgatccttcgcagattacttccaactccggttgggatacgaaagcaaatctggaatttctgtcggaagttctcgatcagttcaacagcgcaggcatccgtacttccgtctttgttgccgccgatccggagatggtggaatatgcggcaaaagcaggtgccgaccgtgtggaactttatacggaaccctatgctacggcatatccgaagaatccggaagcggctgttgccccatttgtggaagcagccaaaacagcccgcaagctgggcatcggcttgaacgccggacacgacttgagtcttgtgaatttaaactatttctataaaaacattccttgggtggacgaagtatccataggtcatgccttgatcagcgacgcattgtatctgggactggaacgtactattcaggaatataaaaactgtctacgctaatgaatgtattgatgttattggcccagggtgccatgaatatggccgactcgctggcaactgccaacccggtgctgactccggtcagcgctcccgagatgaatatgcttgatatggctatcaagggtggttggattatgattgtactgggtgtactgtctgtagtctgtttctacatcttatttgaacgtaactatatgatccgtaaagcgggaaaagaagacccgatgttcatggaacggatcaaggattatatccatagcggtgaaatcaaagcggctatccagtattgccgcacgatgaacactccttcggcacgcatgattgaaaaaggaatcagccgtctgggacgtcccatcaacgatgtgcaggtagccatcgagaatgtcggtaatctggaagttgccaaactggaaaaaggcctgaccgtcatggcaacaatctccggtggtgctccgatgctcggattcctcggtacggtgaccggtatggtacgcgcattctacgaaatggcgaatgcgggaagcggaaacatcgatataaccttgctttccggcggtatctacgaagccatgatcaccaccgtaggcggtctgatcgtgggtatcattgccatgtttgcttacaactacctggtgatgctggtagaccgtgtagtaaacaaaatggaagctcgtacgatggaatttatggacctcttgaacgagcctgcccaaaagtaaccctgagacgttaatcactatcattaaccactaatcaataataaagtgggattaaaaagaagaaatagagtatcgcccaatttcagtatggcatccatgacggacgtcatcttcctgctgctgatattctttatgattacctctacggtggtgtcgcccaatgccataaaggtgttgttgccgcaaggcaaacagcagacttcggccaaaccgctgacaagagtcgtgatcgataaagacctgaacttctacgctgctttcggcaatgagaaggaaaagccgctgtcgttggacgaactgactccgttcctgcaaggttgcgcggagaaagaaccggaaatgtatgtggcattgtatgcagatgagtcggtgccttaccgtgaaatcgtgcgggtgctgaacattgcgaatgagaatcattttaaaatggtgctggctacacgcccgccggaaaacaaataaagtaagtagttgctacttaactactaaaaaaagaaacaattatggacgacagaagaaaaaagggtgaattcgtcggcgcgctgggtgcactgttggtacacgtggcagtgatagctcttttgattctggtgagctttacggttccccagccggatgaagacgcaggcggcgtacctgtgatgctgggaaatgtggagtctgcccgaggctttgacgacccttcgctggtggacgtggatatactgcccgaagaaccggaagcacctgcacctgcggaaacgcagccggaactgccctcggaacaggatctgctgacacagaccgaagaagaaacggtagtgctgaaaccgaaaacggaacctaaaaaggagaccgtgaaacccaaagaggtagtgaagcccaaagaaccggtgaagaaacccgaaaagacagaggcggagaaagctgccgaagcgaaacgtcttgccgaagaaaaagcggaacgtgaacggaaagccgccgaagaagctgcgaagaaaaaggttgccaacgctttcggaaagggagcgcagatgggaggcagcaaaggaacttccgccagcggcacgggaacagaaggcagcaaggacggcaattcatccaccggagcgaagaccggaaccggaggttacggaacatttgaccttggcggacgttctttaggtacgggcagtctgccaaagcctgcctataatgtgcccgaagaaggacgtgtggtagtcaatatcaccgtcaatccggcgggagtagtcattggaaccagtatcaatcctcaaacgaacaccgtgaactccaccctgcggaaggcagcggaagacgcggcgaagaaggctcgcttcaacaccgtggagggaccgaataaccagactggaaccatcacttattattttaacctgagatagtatcactaatcaaaaatataggattatgggaactgtatatgctttttttgcagatggctttgaagaaatagaagcctttactgctgtcgacactttgagacgtgccggactgaatgtagaaatcgtatctgtcactccggatgaaattgtaatgggcgctcacgatgtgtcattactttgtgatataaactttgataactgcgatttttttgatgccgatctgctgttgttgccgggaggaatgccgggagcagctacgctcgacaagcatgaaggactgcgtaaactgcttcttgactttgctgccaaaggaaaaccgatcgcagcgatctgcgcggctccgatggtattgggcaaattaggtttgctgaaaggccggaaagcaacttgctaccccagcttcgaacaatacctggaaggtgcggaatgtgtcagtgaacccgtagttcgggacggaaatatcatcacaggtatgggaccgggcgctgctatggaatttgctttggccatcgtagatctgttggtcggcaaagaaaaagtagacgaactggtagaagcgatgtgcgtaaaacgctaagctgtctatgaaacaatctgtgattattgtcgccggtggaaagggcttgcgaatgggaagcgatcttcccaaacaatttcttcctgtcggtggcaaacctgtgctgatgcgtacgctggaagcattccgcaagtacgatgcgatgcttcagatcattctggtacttccccgtgaacagcaggacttttggaaacagctttgcgaagaacatcatttttcggtggaacatcttgtggcagatggcggcgagacccgttttcattcggtgaagaacgggctggcacttgtgcaggctcccggcttggtaggggtgcacgacggagttcgtccgtttgtaaccctagaagtgattcgccggtgttacaagctggcggagcaatataaagcagtgattccggtggtggatgtagtcgaaacgctgcgccatctgacggatgccggaagcgaaacggtgagccgtactgaatataagttagtgcagactcctcaggtctttgaggtggagctgctgaaacaggcttatggacaggagtttactccgttctttacggacgatgcttcggtggtcgaagcaatgggcgtacccgtatatctggcagaaggtaatcgtgaaaacataaaaataacaactccctttgacctgaagatcgggagtgctctcttgtaaatgttcgatttaaccacacgcgacatcaaatttatctccggtgtagggcctcagaaggccgcagtattgaacaaggagttggaaatctactcgttgtacgatctgatttattattttccttataaatatgttgaccggagccgcatctattacattcacgaaatagatggcaatatgccgtatatccagctgaaaggagagattctcggcttcgagacgataggcgaagggcggcaacggcggctgacggcccatttctccgacggaacgggaatcgtcgacctggtgtggtttcaaggcatcaaatatatattaggtaagtataaacttcacgaagaatacatcatcttcggtaagcctaccgtgtttaacgggcgtatcaatgtggcacatcccgacatcgataagccggatgatctgaaactttcttccgtcggactgcaaccttattataatacgacggagaaaatgaaacggagttttctcaattcgcatgcgattgagaagatgatggctacggtgatccagcagatacaggaacccctgccggaaacgctttctcccaaaatcctgtcggaccatcatctgatgcctctgacggaggcactccggaatatccatttcccgacgaatcccgattcgctgcgcagggctcagtatcgtcttaaattcgaagaactgttctacgtgcagctgaatatcctccgctatgcgaaagaccgccaaagacgatatcgtggatatatctttgaacgggtaggggatgttttcaatactttctattcgcagaaccttccttttcagttgacgggtgcacagaaacgggtactgaaagaaataaggaatgatgtgggaagcggccggcagatgaaccgtctgcttcaaggagacgtgggtagtggtaaaaccttggtagcattgatgagcatgctgcttgcactggacaacggttttcaagcgtgcatgatggctcccaccgaaattttggcgaaccagcattacgagacaatcaaggaactgcttttcggtatggatatccgtgtcgaactgctgaccggatctatcaaaggaaagaagagggaagcgatcctgaccggactgctgacgggagatgtgaaaatcctgataggtacgcacgcggtcattgaagatacggtgaacttctcttctttgggactggtcgttattgacgaacaacaccgcttcggagtggcacagcgtgcccgcctctggacgaaaaatatacagccgcctcacgtgctggtgatgaccgccacacctattccgcgtacactggcgatgacgttgtatggcgatctggatgtttctgtcattgacgagctgccgccgggacggaagccgataaccaccattcatcagtttgacaaccgtcgggaaagtatgtaccgcgccgtacgcaagcagatagaagaaggacggcaggtgtacatcgtctatcctttaataaaggaaagcgagaagatcgacctcaagaacctggaagaaggttaccagcatatcctggaagagtttcccggctgtaccgttgccaaagttcacggcaagatgaagtctgcggagaaagatgaacagatgcagctctttatttccggacaagctcagattatggttgccactaccgtcatcgaagtcggggtgaatgtgcccaatgcttctgtgatgatcattgagaatgccgaacgtttcggactttcgcaactccatcagttgcgcggtcgggtgggacgtggcgccgaacagtcttattgtatccttgtgacgaactacaaactgaccgaagacacgcggaaacggctggaaataatggtgcgcaccaatgacggctttgaaatagcggaagcggacttgaaactgcgcggccccggtgatttggaggggacgcagcaaagcggcattgccttcgatctgaagattgcgaaccttgcccgtgacggtcagctgttgcagtacgtccgttcgatagccgaagatatcgtagataacgacccgtcggctcaaagtccggagaacgagattctgtggcgacaactgaaatctctccggaaaacgaatgttaactgggcggctataagttgaaaaacggttaaacatgcagtttatttgcgggaatgtgttgcaaaacatgtttcttttctattcctcctatttatagggctttaacgccgctttttctgttcttttcatctccgtacttctgaaaaatagttaatgacttacttgccctttcatcggaaaatactatctttgggggaattttttatagtaaatgtatagtttaatcttttgaaagtcacacatcatgatcgaaaaaacgctggttattttgaagccgtgtacccttcaacggggattggttggtgagatcactcatctctttgaacgtaaaggactacggttggccggcatgaaaatgatgcaactgacggatgaattattaagcgaacattatgcccacctgagcagcaagcctttctttcagcgcgtgaaagattcgatgatggcaactcctgtcattgtttgttgttacgaaggtgtggatgctattcaagcagtccgtacgttggcgggaccaactaatggacgtctggctgcgccgggaaccattcgtggggattatagtatgagttttcaagaaaacatcgttcatacttccgattctccggaaactgcggctatcgaattaacgagattttttaaacctgaagagatattcgactacaaacaggcgacttttgactacctgtatgcgaacgacgaatattaattgaattgacaagaacgaatgaatttcaattgcattattaaaacaggattggtagctgtagcagctatggtcagcctgagctctttctctcaagacctgattgcccgccaagctccgatagacaagaaattaaaaaccgtagactctttggcacttcaaaaacagatccgtgctgaacagtcggaatatcccgccttaagtctttatccaaactggaacaaccagtatgcacatgcttacggcaatgctatcatccccgacacttataccatcgacctcacaggcttctgtatgccgactccgagtacgaagattacttcgcctttcggtccccgctggagaagaatgcacaatggtctggacctgaaggtgaacatcggtgacacgattgtagctgcctttgacggtaaagtacgtattgtgaagtatgaacgcagaggatatggtaaatatgtagtgattcgtcatgacaatggattggaaaccatatacggacacttgtccaaacaactcgttgaagaaaatcaattggtaaaagccggcgaagtgatcggtctgggtggtaacaccggacgttctaccggttctcatctccactttgaaacccgcttcctgggaatcgccatcaacccgatttatatgttcgacttcccgaaacaggatatcgtagccgatacttatactttccgcaagacgaaaggtgtgcgtagtgccggttctcacgacactcaggtagccgacggaacgatccgttatcataaagtgaagagcggagatacattgtcacgtatcgctaaagtgcgtggagtatcggtcagcacgctttgtaagctgaaccgtatcaagccgacgaccaccttgcgtatcggacaagttttacgttgttcgtaaagatgtaatacaataatagctttggaagagggcactttaatataatttagagtgccctctttctgtttttacttaattattgttacctttgcgcactatttggaagaagatgaaagataccaagcaacaatttgaacatgtcatcgccttgtgccgtgacttattctccaagaagctgcacgattacgggcctgcatggcgtatcctgcgtccggcttcggttactgaccagatttttatcaaagctaacaggattcgtagtatcgaaaccaaaggggtgactctggttgacgaaggaatccgttcggaatttattgcgatagtcaattatggcattatcggtctgatccagctggaactgggctatgccgaatctgccgacatcagcaatgaggaggctttggctttatatgacaagcatgcaaaggaagcgctggaactgatgcttgccaaaaatcatgactatgatgaggcttggcgcagtatgcgtgtgagttcctacacagacttgattctgatgaagatataccgtaccaagcagattgaaagtctggcagggaacacgttggtgtcggaaggtatcgatgctaactatatggatatgattaattattcagtattcggattgatcaagatagaatttgaaggataagaacttacatatcatccagaagacaggagcgaatgtctgccgtttccttttagcggcatcgttcatcttttccggttttgtgaaggctgtcgacccgctgggcttccagtataagatacaggactatctgaccgccttcggggtgatttcatggtttccttctttcttcccgttgttgggaggcataatattatccgccatcgaattttcaatcggtatcttcctgttcttcggtatcaagaaaacaatctccaccacattggcattggtgctgatgatcttcatgacaccgctgacgctgtatctggcgattttcgatccggtgtcggactgcggttgtttcggcgatgcctgggtattgactaactgggagacatttgcaaagaacatcgtactgctgcttgccgcgattgctaccttccagtggaggaaaatgctgatcagattcgtgacccgaaagatggaatggctgatttctctgtacacgatattctttgtatttacactgtcgttctattgtctggaccgtctgcctgtgctggacttccgtccttacaagatcggacagaatatcatgaaaggcatgagtatccccgaaggagcgaagccgagtgtatatgagagtgtctttatcctggaaaagaacggggaaaagaaagagtttacactggacaattatccggacagcacatggacctttgtcgatacgcgtaccattctgaaagaaaaaggatacgaaccttcgattcacgatttctccatgatggatctgagcacgggtgatgatatcacggaagacgtgctgacggatatgggatataccttcctgttggtggcacatcgtatcgaagaggcggacgacagtaacattgatttgattaatgagatatatgactactcggtagagcatggttacagattctactgcctcacttcctcaccggaagagcagatagaattgtggaaggacaagaccggtgcggaatatcctttctgccagatggacgacattacgctgaagacgatgattcgctccaatccgggactgatgctgataaagaacggtacgattctgaacaaatggagtgatgaagacattccggatgaatatgtactgactgacaaactggagaatctggaactcggtcagcagaaggtccggagtgacgtacatacgattggatacgtattcctgtggtttgtcattccgctgttgctggtgttgggagtggacattctgattgtccgccgacgcgaacggaagaacgaaaagcggaagcagcaacaggaagtaaaagaacaataaatttattaaccctttaaataaagaacaaaatgagaaagaacattgttgcaggaaactggaaaatgaacaaaacccttcaagagggtatcgctttggcaaaagaactgaacgaagcattggctaacgaaaagcctaactgtgatgtaatcatctgtactccgtttattcacctggcatctgttactccgttggtagacgctgctaagatcggtgtaggtgctgaaaactgtgcagacaaggcatccggtgcatatacaggtgaagtttctgctgaaatggtagcttctacaggtgcaaaatatgtaatcctgggtcactcagaacgtcgtgcttactacggtgaaactgttgctatcctcgaagaaaaagtaaaattggctctggctaacggtctgactccgatcttctgtatcggtgaagtgctggaagaacgcgaagctaacaagcagaacgaagtagtagctgctcagatggaatctgtattctctctgtctgctgaagacttttctaagatcgtccttgcttacgaaccggtttgggctatcggtacaggtaaaacagcttctcccgagcaagctcaggaaatccacgctttcatccgttcaatcgtagctgacaagtatggcaaggaaatcgctgacaacacttctatcctttacggtggtagctgcaagccttctaacgctaaagaactgttctctaaccccgacgtagacggtggactgattggtggtgctgctctgaaagtttctgacttcaagggtattatcgatgcgttcaatgcataattagaatatctttcgggaactgactaaaaagtagatagtaactctaaactctcctccttcaggaaggaggggaattgcagatagtatcgactttttagccacttcctgaaattaaacttttatcgaatgagaaaactaggtttacttttatggatgctggcttttaccgctgttggtgcacaggcgcagaacatcatcaagagtctggaacgtacagtgccgggacagggaaaggtgacgattcatcaagaccctaagatagaggcattgataggcgtggaacgtccttctatgggcgaacagaaagtgttgaaagcagccggattcagaatacaggcgtatgccggtaataatacccgtgaggcaaagaatgatgcttatcgtgtagcttcccgcatcaaagagtatttccccgaactgacgatttacacttcgttcaatcctccccgctggctttgtcgtgtgggtgatttccggagcattgaagaggcggacgcgatgatgcgtaaactcaaggcaaccggtgtattcaaagaggtctctatcgtcaaagaccagatcaatattcctttataattgtatcatgttagaaaaagaagaaattgtctctccgaatctggaggagttgaaaagtcattatcacagtattattactttgttgggtgaagatgccggaagggaaggtttgctgaagacccccgaacgtgttgcgaaggctatgctgagtctgacaaaaggttatcacatggaccctcatgaagtgttgcgttcggctaagtttcaggaagaatacagtcagatggtgatagtgaaagacattgatttcttctctctctgcgaacaccatatgttgccgttctacggaaaagcacatgtggcatatatccctaacggctatatcacgggattgagcaagattgcccgggtagtcgatatcttttcccatcgcctgcaagtgcaggaacgcatgacgctgcaaatcaaagattgtatccaggagacactgaacccattgggagtgatggtggtagtggaggcaaagcatatgtgtatgcagatgcgcggcgtagaaaaacaaaattctattactactacttcagactttacaggagctttcaatcaagccaagactcgcgaagagtttatgaatctgattcagcacggcagggtgtaatacgctttacaaaatgtggacgatgtagttccccgtcaatgaggattgcctccggcaccgatgaaggggtgtctcggcaccgatgagaaatttagcgtaatacaacgcggtcgcccaggcgcttcgccatcagactttgcacttcccgcatctcattgtaacgctgcatcagcgaattacatttctcattgtcatgagcgagtgccggatcttgcagggcataaagcatatgcttcagttcttctgtgacaatcgcatatttgaagttgatcatcaacatcgggacgagctcgtacagccgttcttcatctgtcacgatcttctgtgatttcgagtgatacttacttagctgataacgtacattgatcaagtccacgctcaaccggctgatggtctggtcgggatgtgccaggaaatagcgttccgcgataaaaccggcatcgtgtatatgcgtggcggcttctgtcagaatctgccggtgcaacggattatggaaagccaggtcgtcttccttcagatcattcaccacatattcgataacggttaccggaatttcatttccttcttcgtcggtaaggttgcacatcactttttcaccataacggactactgcctgcaggatcaatcgctcaaacttatagaactcctgaccttcttttccttcctgcggaataaaggaggtataagaatctccgggaacagtggtatccgtagtggaggcaggtgcattgccgggaggaaatcctgctgcacctcctgtagcagcggacatcggatctgcgaaagatacgatattgccatcgtcatcatattcgggttccggtggcattcctgcattggcgtagggacttgatggagtagaataagtcggagcaccggaataagccggtgtgccggaagcggcagctgtaccggaagtatctccggttgttgaagatgaatgattatagctgggacgattggctttttcagcctgcgcctctcttaatttggcgacttccgctaccagcagtttttcttcgatgcgcagatgttggctgcattctttgatgtagacatcccgtataatggcttccggtatgacggaaatgcttcgtacgatattcgaaatcagttccgcgcgtttgatcggatctcttcccgcgtcttccatcagaaggtcggtcttgaagcggatgaaatctttttcgtgctcacggatgaatgcctggaattcttccgaattatgtttgcgggcgaaggagtccgggtcgtctccgtccggaagcaggcatactttgatgttcatgccttcttccagcagcatatcgattccgcggatagaggctttgataccggctacgtcaccgtcatagagtacggtaatgttattggtgaaacggtggatcagacgaatctgtccaggcgtcaatgcggtgcccgatgaagcgactacgttttctatgcccgactgatgcatggagataacgtccgtgtatccttccacaaggaaacatctgtcctgcctgacaatcgcctgtttggcaaaatagattccgtatagctcgttactcttgtggtaaatttccgactcgggagagttgacatatttcacctttacccctttggtggcggtgctgagcacacgtccgccgaaggcgaccacctttccggaaagggtatggacggggaaaatcacacgtccccagaagcggtcacgaagacggtggtcatccgtttcgtagcagattcccgttttcaccaggaattctttcttgtagcctttgcgcaatgcttcttgtgacatggcatcatggctttccgtacagtaacccaactggaatttctcaatgatgtcatcacgaaatccacgctgacggaaataagccagaccgatgctgcggccgtccacatgattctttaagatattctgaaagtaatcgcgggcgaagttgttgacaatgaacatactttcgcgcgttgtctgcgcctgtttctcttcattggtcagctcccgttctttgatttcgatgttgtatttcttggcgagatatttcagtgcctcgtaatacgacatctg

SEQ ID NO: 4581 - DNA, 20355 bp, Unknown
  gut microbiota DNA sequence
ggtagccgccatttttagagaagcccttccggtagaaataccagaagggctttattgttttggatactttcggatttaagactggagaggatttattgattatacatatttctctcaattattaaacttggcggacttctttaaaacgtatgtacgcctaactacttttaacacataaaatcacaaactgcgagaacaaaacactttgtacgttgtttcaataatagagttaaacttttatgcttaaatgatgtgaataacgacaaacggatatatttaattgctacatttgtcgccgaaatacgagaattcgatataaacaactaaaataaatatcatgaaaggttctgtgagattcatattagcgattgttctgctgatgctatcatatagcataggtggaaatgctatgaatatcacttcatgtatttctcagaacgaatgctcttgtcagttgtctgaatcaacttccgatacgaattctaattcttcatttaagactcgttcgctggggtatgacagatcatcccagtctttgtctatttctgacgtagaattaggctttaaatcagtaacagaaacatcttctaataattatcgtctgcgtagaatcattgaatccaatgatttctttaaagacgttatgtataagttcttcttgttaagagaaaactcacttgtattagatcaaagtaaatcctattattcggataaggatccacattactccattatctgtagcgactactacgtgttcgctctaagacgtatccttatttaattacttatcccatcttatttactttttcgtaccctgtatgaagctgtgtgactttcattcttgaaaagtcacagggtctatagcgcagtgtatctaatcatttgaaaattttctaaataactaaaattaatatcttaacaaaaaaacttattatggaaactactaaaaagtctcagattgtaggtataaagaatgccggtatcgtaatcatctgctgtttcattgtagcagtgtgtatttttcagttcctgttgggaaatccgtctaactttatgaacaatgatcctaacaaccatccattgaacatgttgggtaccatttacaaaggtggtgtgattgtgcctgttattcagacactgttgttaactgtactcgctttgagtattgaacgcttttttgctcttcgttctgctttcggtaaaggctcgttggctaaatttgtagctaacattaaagaagctctggctgccggtgaccttaagaaagcacaagagatttgtgacaaacaacgcggttctgttgccaatgtagttactgctactttgcgcaagtatgaagaaatggaaaagaacactgctttgcctaaagaacaaaagctgctggctatccagaaagaactggaagaagcaactgctctggaaatgcctatgatgcagcagaatcttccgattatcgctacaattactactttgggtacattgatgggattgctcggtactgtaatcggtatgatccgttcatttgccgcattgtccgccggtggtggtgccgactctatggctttgtcacaaggtatctctgaagccttgatcaatacggctttcggtatcttgacaggtgcgttggctgttatttcttacaactacttcactaacaaaattgacaaattgacttacggactcgacgaagtcggattctctatcgtgcagacttttgcagctactcattaatttggcgaaccctttaaaatctattaatcatgggtagagcgaaaattaaaaagaaagatacgttcatagatatgaccgctatgagtgacgtaactgtattgcttctgactttctttatgttgacatcaacatttgtgaagaaggagccggtgcaggttaccactccagcctccgtatcggaaatcaagattccggagacagatgtactccagattttggttgaccaggaaggaaaaatatttatgagtctcgacaagcagcaggatatgcaggctgtcttggagagtatgggtgaagagtatggcatcaagttcactccggaacaggcaaagaggttcacagtggcttctacgtttggagtgcctatcagaagtatgcagaaattccttgacctcccggaagatcaacgggacaaaattctgaagaatgaaggaattccttgtgatagtaccgataatcagttcaagtcgtgggtacgtaatgcacgtgccgccaatgctgatctgcgaattgctattaaagcggacgcttcaactccatactcagtgataaagaacgtaatgaactcacttcaggatttgcgggaaaatcggtataatctgattacttctctcaaagcagaatctgaaaattaaaagggaggaaagacaatgagtgctgaagtacaagagagcagcggaaaaagaggaaaaggcaagcagaagaaaatgactgtccgggtagactttaccccgatggtggatatgaacatgttgctgattactttctttatgctttgtaccacgctgagcaagcctcagacgatggaaataagcatgccgagcaatgacaaggatataactgaacaacaaaagagtatggtgaaagcctctcaggcaattacattattgctgggagccgataacaagctctattactatgagggagagcctaactacaaggattacacctcattgaaagagactagttacggggcaaacgggttacgtgccgtacttcttcagaaaaatgctgcagctgttaatcaggtaagagctttgaaacaacagaagctcgatctgaagataacagatgacgaatacaaaaagaaggtttccgaaataaaaagcggaaaaaatacgccgaccgtcattatcaaggcgacggatgatgcttcttatatgaatctgattgatgcattggacgagatgcagatatgtaatataggtaaatatgtgataacggatattgccgaagctgatgagttcctgattaagaattatgatgctaagggagaactgtcacagaacttggccgataaatgatgtaacacctaaaaaaagaaagtaaaatggcaaaattagatttagcttcttcggaatggtgtcagctgatttttgaaggcaagaatcaagcgtacggcgcatatagaatgcgtgccaattcacccagacggcatactattgcaatgctgattgtggtggcgatagcaatcgttggatttactatccctacgctgcttaagttggcaaccccggagcaaaaggaagtaatgacagaggtaacaactttgtcgaaattggcagaaccggaaatcaaacaggaagagatgaaacgggtagaaccggttgcacctccccctcctgcattgaagagttctattaagtttactgcccctgtcatcaagaaagatgaagaggtgcacgaagacgatgagatcaagagtcaggaagaattgacttctaccaaagtggcaatctccattgccgacgtaaaaggtaatgacgaagccaacggagccgatattgctgacctgaagcaagtggtgacacaggctgcagaaccggaaaaagtatttgatatggtagagcagatgccgaccttccccggtggacagcaggaactgatgtcataccttggaaaaaatatcaagtatccgacaattgcacaggagaatggaacacaaggtcgcgttattatccagtttgtggtagagcgtgacggtactatcaccgacgtgcacgtagctcgtggtgtagacccttacttggataaagaagccgtgcgtgtggtacaaagtatgccgaaatggattcctggtaaacaaaatggtaaagcggtacgtgtgaaattcaccgttccggtaatgtttagattacagtaagatgatgaagagacaattttggctggtaggaatcgttttgttggcggtgttgagtgcttgccgttccaaatcggatggaccgacggatacgtattcgtctggggtgatatctattgcggcggatgaaagttttgagcctattatacaggaagagatagatgtgtttgaaagtctgtatcctttggccggaattgttcctcgctacacgacggaagtcgaggctattaatttacttctgaaagacagtgtccggttggctattgcaacccggacattgactgaggaagaaatgaattcctttcacagccgcaagttctttccccgcgagattaagctggctacagatggtctggcattaatcgtcaaccgggacaatccggattctttgttgaccgtacgggatttcagccgcatcctcactggtgaggcgaaagactggaaggatataaatccgaactcccgcctgaagagtattcaggtggtgttcgataataaaaactccagcactgtacgctatacaatggattctatctgtggtggaaaaccactggctactgacaatgtcagtgccttgaagaccaatcagcaggtgataaagtatgtagcagagaaccccggagcaatgggagtcattggtgtgaactggctgggcaaccgcagcgacaccaccaacctttctttcaccgaggaaatcagagtaatggcagtgagtgcggaggatgtagctactcctgctaacagttataagccttatcaggcttacctgtattatggtaactatccattggcacgacccatttacgcattactgaatgatcctcgcagtgcgctgccttggggattcgcttcttttatgacatccgacaaagggcagcggattatattaaaatctggacttgttccggctactcagccagtgcgtattgtccatgtgaaagacgaataataactaaaattagagactatcatgaaaagagtacaaatgtttttagctggagcgtttatagcagttgggtcgctctatgcgcaatcatctgatgccgaatggcaggcaggagttgcaaaattgaaagaaaccattcagacgaatccggctcaggccaatgaggaagctgaacagttgataaaaggaaagaataaaaagaatgtggaacttctggtggctatcggcgaggtatatctgaaagccggaaaacttccggaagcacaggagtatgctgctcttgccaaaaaagtgaatggcaaatcggctcttgcctccgtactggagggagacatcgcctttgagcagaaaaacgccggtctggcatctcagaaatatgaagaagctatctatttcgatccgagttgcacagaagcatatctgagatatgcggatatttataaatcagccaatgctgctctggccattgaaaaactggaacagctgaaagcccaggaaccgtccaacacagccgtagataagaaacttgccgaaatctattatttgaagaatgattttagtaaagccgccgaagcttattcgcgttttgcgatgggaccgacagcgacagaagaggatttagtgaaatatgcatttgccctcttcctgaaccatgacttcgagaagtcacttgaagtggcgaatatgggattgaaaaagaatgcgcgtcacgcggcgttcaatcgtctggcaatgtataattatacagacctgaagcgctttgatgaagcaataaaagcggcggatgctttttttaccgaatcggacaaggctgattattcatatcttgactatatgtattacgggcatttgctcgaagctctgaagaaatatgatgaagctgtaggacaatatgagaaagccatacaattagatccgacaaagacggacttatacaaaaatatctcttctgcttatgaacagaagaatgattataaaaaagcaatcagtgcttaccagaaatattatacatcccttgataaagaacatcagactccggatttacaattccagtttggcagactttattatggtgcaggtacgcagactgattcgctgacaatcaatgctgaagaacgcaagcaggctttgatggctgctgattctgttttccattccatcgcagaagcagcaccggacagctacctgggtaatttttggagggcacgtgccaattccgcacttgaccctgaaacgactcttggactggcgaagcctttctatgaggaggtagccaccctgctggaaagcaagaatgatcctcattataattcagctttgattgagtgctacagttatcttggatattactacttgttggctattgaaaatccggcactgaaagcggaagcaatggcgaataaagaaaaatcgaaggagtattggagcaaaattctggctatagactccactaatgctactgctaaaagggcattggatggcatcaaatagtgaataattttagttgtttgtcgtgacaggaggagtggagagtgatcttagctcctccttttttattgttacgtttagctgtttttcagtctgttacattcctttggtaagcgtaaagcagtcgatgtccggtgcccagttgtagctgttgcccatacggatatgattgtaaccggctttcagatcaacggggattgtgacttgattgtgcttgtcatcttctcccagtgaatcgattttggttacgatgccgttgacatctatctccagttgtcttcctttgccgaatgaataatgaaccgtcatttggtaacgtccgccgtctgcgctgtatacttccggccattctgcgtaattctctggttgtccgcccaagaaacctactttcatttttccggaagcttcctgatcggcggcatatatgatgcctttcggatttttgccgagatcattgaacattggcaggtatgcccattctgcttcatataatgtcggttccagacgtgtttcgccttccatgcggaggaacatagcgctgtgtgcaggaagcgtttgctcaaagacatcagagaaatttcctaaatcactgcgttttgccaagtcacgtacttttacgttcccgccaaactccagtgccgagaaaggtacggagaagctgcaaacagtatccgatggattgtaaagagcaacggcacgtacattaccacgtttttgttcgatgtcttttaccagtacatagccttcgttctcatgttgtgctacgtatgcctgcaagcccaacgggtcttggttcagagcgattaattctttgtttgtcagcagttcaagagaagattccggcaaactttccagattacatccgatcagcagaggcgagctcatgatacaccataagccgaagtgagcttcttcttctgtcggggtaagtccttttcctcctactttgctgttgtcgcggaaaccgatgaccatcatatccatatcattgtagtgcccgtctttggcgtaggcagacaggtataggtttttgccgaccacatatctcaatgacccccaatgtgcattgatgtcaccgctgatacgccatgaagtagctacatcctttgcccatgtgccgggaaaagcccaacggcagatgttgacagagacgtccttgtttactttgtcgatgctgttccggatggaagtatagcgttcctgttcattcaggcccagtacatctccgccgcaatagtctatcttgataaagtcgaatccccagtcgccgaaatagagttgggcgtcttgttgctcatgtccgtaaataccggcacctactcctgcatgatcgttgtcccagatagaaccgcaagtgttgttgccggcatctgtataaataccggctttcattccaagactatgtatatggtcggcaaccggtttcatgccattcgggaaacggtttttgttggtctgcatctttccattgccgtcccgttcgccgaagaaaccatcatcaatattaatataatgatatcctgcgtctttcagaccttttttaaccatcaggtcggcctgattcttaataatatcttcactgatatctacccggaaagcgttccatgagctccaacccataatagggggattgactgctttttcacttccggactgagaaacctgagtttctgcacaactaacacataacaaggaaactaccgctgtggctaaaaggtggaatctgtttttcatgatgtaataggttgatgaattaatgggattaaatgaaatattggtaacaaagatataaatgaatctattggcgtgcaaataaattaaattgaaaatagggaggaatcgaacgaaaaagaaattgattattgaattatccgatggatgatcagtacttcatacccgccgtcccgatttcgtcccggctgttttaaaaaataaggattaactttctgaatctcagtaagctaacccttatcttgtcggaatgaggcgactcgaacgcccgacccctacgtcccgaacgtagtgcgctaccaactgcgctacattccgctcttgaatgtgatgttgctgaaaattgagctttgaaaatttttattcgtaaaactctgattaacaatacaattattatcacattataatcaaagaaatagattgtatatatgttaaatgtttaacctatattgctcttatttttttgacggtgcaaagatatggaaaaggttcgatttatccaaatactataggaatattttttggagggaacttcataatgtattcttttataatgataagaacaaagctatatcccgtgttcttctctttagtgctgacttttaagacaaagagtttatctcctaatgagaaactgaaatattcattattaggtataccggaaatatgcaaaattgaatatatgcggatattagttctagtatatatacaatttaagtacctttcttcctaagagatgtatccaatctgttgcaaaattatataaaatattgtaaatgacaatgtaaaatataaactttttttttagctaaactattaaaaactaggggatttgcaaaactttgtaatctatacatatttctagttaattcattattcattgaaattcaattaattacaattatattacagattggaaacttctcttaggaagagatatatttgaaatgtcatttatttctactcatatatataggggtgttgaaaagatgtatgtaacattgatttgatatataacgtatgtctaaaatatttctatttccgatatataggataaataggattcgaattgtatgcgtgtatgtgtgaatttagtaatatataatacttatatatatgaaaaaaaacaaattgaaactgtatgcaattatgatttttgtgcttctctgcacagaagtacattgtcagaaagtagcaatcaaaagcaatttattgtatgatgttactgcaactgttaatgcaggaatagaagttggccttgctccgaaatggacatttgatctttctgccaactataatggctggactttttcacatgagcgtaagtggaaacattggcttctacaaccagaagggcgttattggttttgtgatcgtttcgctggtcattttgttggtgttcatgctttgggtgggcagtataacattggtaatctgaacaatcatatttcatttcttggaacagatttatctgtgctttctgatcgtcgttatcaaggttggtttgccggtggtggtattgcttatggttatgcgtggatattgaacaaacgttggaatttggaagcggagttaggtctgggctggatttatactcgctacgacagttatccctgtacccaatgcggtacaaaaatagccgatggaaaatcgcataattatgttggacctacaaaagcggcagtcaatcttatatatactttttaaatcacacaaattacggatatgaatagaacaacaaaaatattttgtagtagtttgctattcctactcttgatgatgggagcaaaggctcaaacaataatgggcggtaatgtgacagtatctgaccttgccgtgtctcgttcggaagataaattgttcgtatcaatggatattgatgtttcggcattgagtgtaaaaagtaaccgtgaagtgattcttacgcctagattgtcaggagaaggtaatgaattgaacttaccttcggtgatgatagctggtcgcaaccgctattatcatcatctacgcaatggcttgtgtacggatgatgtgatgctttatcaaaaaaacaaagtatctgtggtcaaatatcgtacagtcgtaccttatgccgattggatgaaacgtgccatgctcagtacgggcaatgaaacatgcggttgttgcggcgaggcacttgttgttggcaacgagcctctgttggtacttcagttggagccgaaagaatttgtgcctgcctatgtatacattcgtccggaagctgaaccgaaaattaatgtactggaaggttcggcttatattgactttcctgtgaaccgaacagaaattcatgagaattatcgtcgtaatccgactgaattgcaaaagatacttaatactattgatgcggtgaagaatgatgtggatacacggattatctctgtcagcattaaaggatatgcttcgcctgaaagtccctattcgaataatgaacgtctggcgatgggacgaacgaaaacactgaaagagtatgtacgcaaacagtacgattttgccgattcactattcattaccgattacgagccggaagattgggcaggactcgaacgttatgtggaaaactcgtatctcgaaaacaaagcaggtattctggcattaatccgcagtaacctggaaccagatgcaaaagaacgtagcatcaagactgcctttcccaaagattatgcattcttactgaaagaggtttatccggggcttcgtcattcagactatgcagtcaaatatgaagtgcgtacctatactgatatcaacgaaatcaaacgtctgattaagacacagccacagaagttaagtttgaacgagatgtatcttgctgcacaggatatgaaactggggagtgaagaatataatgaaacattcgaagtcgctgtacgtatgttccctgatgatgaagtggctaatctgaatgctgcaaatgccgcaatggacaggggggatatgaagaatgcggaatattatctgaagaaagctggaaactcacctcaggctgtttatggtcggggaacatacgctgccttgaagaaggagtttgatatggcagaaaaaatgtttactgaagctgcacatagggggctggctgatgcggaggagatgttaaagcaaatagaagagataaaacattaacaggatctaaatataaaaacatagaaattattaattcattcaaagttgcagattatgaaaagaattagcaagtattttttatgcctttttgccgtagttctcacagcaggttgtgctgaggataaactaggtgaaacagaatttgaccctactgtttatgagggagataaggcatacatgacagtacaggtaactatgccgtctgtacccggttcgcgtagtaatacggttgaaggtggtggcagcaatgttggtgtcgaaatcggtaaagattatgagaacaatgtgaaaagaatgtacgtggtacttgcccgcagcacggataatgcattcattgcttttggtgacatgtcggacaagatgaaacaatccgcaaataaacaggcttatatcggaacttccgaaataactaaaacacagttgtctcagttctataatgatacagaaacaccaactgataaaaaggaagtgaatgtatttatattttgtaacccgacagatgaattggtagaacttatcagtaaaactgaatataagaatacgacatggtataatgcaatttgcaagggtgacgataaggaattaggaaagatatggagcaagaatgaaggtggcagcttcctgatgtccaactattccatagccaaacgcttgcttcctaatacgatgaatgactggttgttatataatgaagctactccgtttaatctttccggaataaacaatgcgggaagtttgtcacaagtagacaacagtgtaggtggtgcagtgaaagtagaacgcgcaatggcacgtttcgattttagagatggtagtcgtagtttgcctgaaaatatacgtcctcaggaaggcaatacctatccggttgtacaagatattgcaccggacggaacacctggtgcttacattgtaaacgttcaattaggtaaaatggctttggtgaatatgaataatagtttttattatttgcgtcgggtatctgataatggacttccggcacaagctagtctttgcagcccggaaaagccctggtttaccgttgcgggaggtggggaaactcatcttgttggtaattatgtcgtggatgtgtgggcaaccgagaagaatcaaggcattgagacagcaagattaagtgagtattttaattaccctctctttcaagctgacggctcaatagacaatacaaagcaagatcaatggaacacacatttattatctaacattcttggtggtgaagcagatacagataatagctggaatactggtaacaaatatggtgattatcgtatatggcgatatgtaacggagaatacaattccgggaccggttgacagacaggtaaacggtataacaaccggtattgttttcaaaggaaaaatgatagctactgaagatgctgctaatagctctgacgaagatctcaagcgcttggcagaagttattaattacactgcttctgatttgaagcgtgattcttataaagatccgattatttatatgtttggcggcaatttgtatgtaagttggccaaatgtgcgaaaagcagtgaaagctgttgcatacaacgaagagaccaaaacatggagtcgttctcatccgctttatgtggctgtatatggtaccggtggtacaggtgaggaaggggatgctagccctcaagatgaaagtagtgctaattctaaatggaacacttgggacagaaacaacaaaacacttgaaggttcttatctcagtgatttcagacaagcagctactgatgccggcataaccatctatcagtcaagcgaggacaaagacggtggttggggctattattgctactattattattggaatcgccacaatgacaatggtgtggaaggtgaaatggctccgatggagtttgctgtagttcgcaacaatgtttataaacttgctgtaactaacatttcccgtcttgggcatccacgtatttcagataatgaccctgataacccaggccctgatactccggatgagcgaggtgatatttatctgacagtttcggtagatgtattgccttgggtggttcgtgtcaataatatcgatttttaagaaaccaaagatgcataataaaaaacgaaatataatttcagggtttatcagtacggtgcttggcatcgtactgataaattttgccttttcatcgtgtgaacgtatttatgaagatcttgctccatgtccgcatggcgtgtcactacgcttcatttacgactacaatatggaatatgccaatgcatttgctaagaaggtggattgtctgacattgctggtctatgatgaaaatggcaattatgtggatactcgcatagtgacgggtacggagttgcaggacgagaattatcgcatgaagctggacctcaaacaaggaaattatcatttcgtagcttatggtggtctggcttgtaataagagctctttccttatgaagtatacacccggagaaggaactggatataccgatttgcaagtggaactggattcggaatgcttgacaaatcccagacgaaagaacttgcatggtttgtattggggtgaacttactctcgcaactgccgacctttacagtgaaggcaccgttgagatgatgaagaacaccaataatattcgtgttgtgttgcaacaaatgaatggtgagccggtagatgataagaaatttgaatttgaaattaccgatgataatatactgttcagttacgataataatttgcttgagaatggtatggtgacatacactccatgggcgcaagggcaagcttcggcaggattcactgatgagggaagagaagtggtggtagcttatgccgaactatctacttcacggttgatggtgcgtgactggtactcacctaagctgacggtgcgtcgcaaagcagatggtgtggaaattatcaatattccacttattaactatttgcttatgcttaagagtgatctgtatgcaagcatggattcgcaggagtttctcgatcgtgaaagtgaatggtcaatgatattcttcttaagcccgaatcttgaatggattaaaacttatattaagataaacgattggactgtcagaatcaacgatataggacaatgaagaaaatcgcatatatcattataccatgggctatttctctcctttttcgggggtgtgctcatgatgcagatagtgaaatgtttgacaggggagtgccgttagtgaatcttaatatcagcgttgccctgtctgacatatcgcaatcgggtacacgggccagtgatatctatccagagtctccggtaaatgataatgagaagatgaaaacgttgcgtattattgtagtacgtaacaatgataatatagtggaacataaccggatttacaatttggaggttgcatctactgattgttatagcgagccgatgaaggttatcggaaacgaaaagaaacgaatttatttgtttgcaaatgaagctacggaaataaagacaacgggattttttccgaaacgtaaattggtagagtgcgattttgagaaaattcagcccggaagcttattctttacggattatatatccaacctaaccattcggctaggcagtaatacggaacgaattgacgggccgttgccgatgagtggactttatatggtagatgtgcctgccgaggattgtgaacgtgagctttccataacgagagcagctgttaaatttactttcaatataacgaatgaaagcagccggtccatagagatcacgaaactgactattgataaaatggcggaaagggagtattacttgccgcataatgctacatatatatagagagaaacgacggagggaacaaagttctgggacataaatagttttgatgttcctactttgaaagggtattatacatatgatgcgtcatcgttgtttaaagggcaactactcccgggagatgaaaatacgaaaaccaatgagcaaccgatttacctgttggaggggaagcatagtgatgacaacaataaggaaaacccttatctgctgactttgggtgtcaacggaacagaattgaaaagttacttgccaaatcttccacagttgccgcgaaatacacatgtggtggtaaatatcacaattaatgaacatgcaatggattgcatagtagatgtgcgtccttataccggaatcacactagaacccgatttcggattataaaaaatgaaaggaaagatttccttaaataactttatacaggaaaatatgaaacgcaacattatttatagtcttacaggtatgctgatatttgtcttgactgcctgtacagatgattggctgaacaacgaaggcgaaagaatgccggaaggagaagtcagtgtgagtgctactgtagagtttcttcctcttcggccggctctggatgtaaacactcgtacggcaggagatgtaatcaaagacatcaatgatctttgtgtgttgctgtatgatgaggaaggaaatctggtgaaatcgtactatcttcttccgaaaggtgctgcttcaacggaaactacagataaattcgatgttgatgatattgaccgtacagacgcagatgcggaaggagacaaaacggcggaaaccaaaaccaagcgggctaccttcaagttagctcaagttccttacggctattattacatgtatgcggtagcaaatatgggtaacttggctgaatcggaaaaagataatatacaaacagtcgataaactgaaatcgattaatctgacatgggaagcagaaaactggttctcgacagaagaaactactgatggaaaagtgacaaaagctactaaaaaccatcagatgtttggctacttcacaacaaaagagaatacacctgcgggtgctaaccgcaatacggaagcttcacggatagctataaacaagaaagatatggaattgcatgcatggattcgccgtgcagcttccaaagtaaccattgcttatgatgccagtggattgaaagaaggagtttttatttacttgaaatcggttcagataaaggatattcctgttaattgctacttgggaaaaacaaacacaccaagtgaagatgaacaatcgtccttaataaaagacggagaaattataaagtattatacaggaactaccccacctgcatttgacgaatcttatccggtgcgtttagctacgggaagagcttattatccgtgtgaagaaaatggaacttttaaatatggacacgaagaggcagctgatgctttgtttttctttgagaatatgcagggagaccagccatatgataagcgccaggatgcagataaagatggagaactggatcatcccggattacctcctcatctgcaacagccggacaaagattattcaaaatataggccaaaagataacgtgccttatggtacatatattgaagtagacgcttattatcgttctattaatgaagaaaaagtaggtagtggtgatattaaataccgttttatgcttggcaaaaacattacaacaaactatgatgccgaacgtaatcatcactataaacttacattgaaatttaaaaattttgcaaatgatgcagactggcatatcgaatatgctgaaccggaaccaggtattgaggtgcccaatccctattatatttcctatttatataacagaacgatggatttgcctataaaaataaatccaggttatgcgaaagtggaaagtgtgaaagcggaaataatcaacaatggttgggcgcctattggtgcagatgctaataattttgattattatcattttgatttggaaggcaagaatgtatggaatggatttctttctttgcgccgtactactgcaaccatacttacaacaacagaaaaagatgctagtgaaggctcgggtattgtttatgcagaaagcaaccaagaatactataaccgaactcaacgaggaaatcgcgaatatgccgtagatccaggcattcacgaagatactgaatatggtaattattctgtgcgtaaagaagaggggacgaatatacttcatatgagtatacctttatatacacgtgcgaaacagatgatcgcaaaaactagttataccgggaataatccatatgtagcctaccggcgtcaggcaaaaataaaaataaccgctactttatcgcagggtgagccattaacagaaatagttgatatattccaggtacgtcgcgtagtcaatccaaaaggaatatatcgacggcataataatgacaagcctttccatgtcgttttaaaacgtttggcacgggagaatgctacaaatttcgaagaatttacttccgagggggcttgggaagctgttgttgcagcgacaacacacgaaggatttgtgaagttagaaaaaagtagtagtaacaagtatacgagtatagatgaacatggtacacttaaggggctttccggttcagtaattgatttcaaaattactttcaatggtacatgtacagaaaatgaatcccgccatgccgttattcgtgtcagctatcacaacaatacttgcaatcaccttatatttgtccgccagggctatgctcctgtagctttgcttgatgaaggacgggcttggcatacgtttaatatgaaaactgctacggaggaaacagattcgccagtagaagaagggtcattgtttaagtggggaaatctgaatgagccaattgatgcgtcaagtaataagcatgagaaagaatattggatagaagtacagccgaaagactttaaagatgataaagccaagccactaaagattgctggaaaagagactactaaattgtgggatgaaatcacatctcagccttttaataccccttttgaaaagcctagaatcaatggaaaagaagtggaaattgccaattacgatgattataatgtattgtataaaagcaaggatatagaaatgggctatggtgtactctatggtgatgatgctgaggaaacactttccgatatcaatgaaatatacggatatcgttatggcagttccggcacatatggtatgcgtggttgttttatatataataaaacgaatggacggaatctattctttccgataggagcgtcaggctatggacatagaaaacaaggatatggtgatatgagaaattggcagggcgtagttactggtcagggctatatacatggtgagacaaaaaatgcagttgtactccgttattctgctggacgtagtgataaattcaatatgacggcaggtgatgagaaacctttgttttatgatttgtatatgcgtccgggggctatctattggttacagcgggtgtatccaccaggacgcgatggagaaagtgatattatggcgtgggatattaattatttctcttttgattttaatctgatttctaaaagtaatgtttacgcaactcttactggtgaaaataaaatagaaacacctaaaagtgatgcatgctttatccgttgtgtagagccatgataatcttatttattaataatgtagcattggaaaactaaacagggctgacttttgggtcagccccgccaatactttttttgtatactataatgatttaagtataatactgtttgctttatccactatggaggcgtctaacgaggctagataaatacgtgttgtgttttcggagtcatgtcccatagcttcgctaataaccgagatagagatattcttactcttggcaatgtttgcccatgcatggcgggcgacatatgttgttagtgtgacggggatctctaacatttgtcctattaccttcagttttctattaatcaaatgtgaggcatttttatattctcttcttgggtctttaccgttatttttgatgataggtagtagataaggactttctatagtattatatttatcgacaattttttgcatggacttttcccacttaatgaacaattgttggtcggttttatgtctgcgataggacagaactccattttgcagatctttctttttcagatatgccatgtcaatgaatgacattccgcgggtgtagaacgagaacatgaagatgtctcttgcataatccatcaaagggtttgtgctcagatctaaattttgtatttggcgaattgtttttagagatacagctcgttttactgttttgtcaataccggtatatacatacttgaacggatattgttgttgtgttaactctttttctacagcacgattgtatattgctcggagattccgcatataatatgaacaactgtttggacagacaccgcagtttttaaggtatatttcatattttatcatcagattggaatttacatcttcaagtagaacgtcaccattattgtccataaaacgcttgaaactgttgtatgctgaggcataagactcggcagtgcgttctttgccgatttgttttagttgtataataagatcttgtgcgaatgatagaaaactgtatttattgatggggggaatacggaatagctctattatttttccggaggtaaaaggattgcccgaatgttcaagctttgaaatgatatttttcagtctatgcatgtcctctgctatttggcttgttagttgagcgagaaaacgtcgtcttatgtcattattgtccggaagaatgatgcaagccaaatgcttatcccattctgaaggaaaaattttatagccggtattgatttgcctggttactctggcatgaatgatttgatagaataatacgccttcttttgtttttacggaagaggtacggaatttgatttttattgttgccatatctacatgatttgttatataaaactataaataaatgaatataacaaatgagcatttatctgtctctttataaaattagtcctttgtcatacagaaaaaatgcctaatggaaacatttttatttatcattcatttaggatattagaaaacatatttgctatagaaaaagtttgttcattaaatgaatttacaagtgggcgaaaagctgttgcttaacatgagatgatgattgaataaatgctgtaccaaaatcaattgcagaatggtaccatatttatgttgattctcattcctattgattttacctgttccagaaaaagaaaaatccctgaattttgaaaaaaatcagggattaatattgttttgctttttaaaagtggtgccaccagcaaccgaaaccgggttgatatagcactatctt

SEQ ID NO: 4582 - DNA, 65906 bp, Unknown
  gut microbiota DNA sequence
ctggttgctacttgtctgccaggtagagttacacgtcacatctatttttaatgtctcgccatttgcgctaacatcatcgaaagttgattgcgataattccagtttcgctgtttctgaatctgaatcgccacaactaataaggaaaaatagtaatggaagtaggaagattaatcttgttttcataaataagcgagtttttatagtatatataaacgtatggctcaaagataatgttttttgaaacaatagaggcttttatttaaagatgtattctacttctttaaacatatatcctctttttttctgcgcatcatcttccagaattagcttcccttcgggttctacgcaaataattctcgcaaagaactctccatcagcatctttataccgatgcatcccttcttttctgaaaagagctttttcatatcggtgggctatgagttcagtgtcaccgttccggagcaattcataactggattgaatgcggagcatgatatttttgagaatttcgaaaatgtcatactgctttcctgtgatttgccggagcgatatcggatttggagcagtactatggaatacttcttgattcacattgatcccgattccggaaatactctgactgatattacgccccatcaaatcattttcgatcagcatcccacatatttttttgtctttccagtagatatcattcggccatttgatggaaaaatcgtcagcatagctatctagttcctctttaatagccaaagacacaatctgagaaatcaagaactgccggcgtgcttccaagaaatccgggaaaagaacaaaactgaaaagaagattctttttgggttcagattcccacgaattgccacgttgcccacgtccggatgtctggaagtcggcaactacagtcgtaaatgctgcaactccctgttgcttggcacaaagagtctgcagataactgtttgtagagtttgtctcactgatgtgaatcaatgggacaggaaatgacatatcaggggagggcatcatattcagcacgcagtttcttagtgaatttcttgataacttcctcgtaagaatgatcgacgagttcctttattaatttatcgtctacgtctctatcgaagtaaacgccattccaatattttttgttgaaatggtaggctccttcaatgcctgcataatgttcgcgcagttcaatggcacgttccggatcgcatttcagtgagatggagttggctccttccaagtcgatgagggcaaacattttgtccatcaccttcataaccagcgatacatcatcaaacgggaatgattcggtaaccccttttttacttaagcagtattccctgatcgtttctacattcataagtctttcgattttatgtttttgctcttagttaaaatacttgtttcctattaaaataaaggaggataaaaagcttcctttatatggtctattctgaaatttccgttctcgccaatgacagtgatgatatcgaaacgtaccggaacgtcaatctgaaatagtttcatatatgcgtcggcagcacgtactgtccgtttaatctttggtaaatcgacggcttcttccggttgggcaaacaaagtattactgcgtgttttcacttctactatcaccagttcattctctttggcggctacgatgtccagctcgaagtgtccctttctccagttccggtgtcggataagataaccatgctcttcgagataggctactgcggcattttctcctgctttccctaattcattgtgttcagccatctttttttgcaaatttacagcttttattctttgtttttacagaagtaaaagtaattttgcagaagatatgagaaaaaggagcaaaaagtgcctgaaaatgcacgctgagtataccaaacgggaacggcggatgagcattttgttgagcgaagacgagcagctgattgtcgatcgttatctggaaaaatacaagataacgaataagtcacgctggcttcgcgaaaccattctcatgtttatccataaaaatatggaagaagattatcccaccctcttcggagaacatgacatgagacgctgatgatgacactggacgatacttacttcatgaaacaggcattgatagaagccggcaaggctgcagagcggggcgaagtccctgtaggggcagtggttgtctgcaaagaacggatcatagcccgtgcccataacctgacagaaacattgaatgatgtgacagcccatgctgaaatgcaggctatcactgctgccgccaatgtacttggcggaaagtacctgaacgagtgtacgctgtatgttacagtagaaccctgtgtgatgtgtgccggtgccattgcttgggcacagaccggcaaactggtttttggtgcggaagatgataagcgtggatatcagcgatatgcggctcaggcgctgcatcctaaaacggtcgttgtaaaagggatccttgcagatgaatgtgccacattgatgaaggactttttcgcttctaagagaagatgaaacagtgattagtaagttgctgactacacgttactaaccactttctatattatattattttacttcctcgaaatctacatattcaccgtcatcctgagtgaatattttcttatgtttggttcttggactgttttcagcaaagatttccccttcgttatcggcacggctgtccgtgttctggttatagttgggacgaccttgctgctggccattttgtccactccttgcctgcttcgtccgggaagacgaaccacggccaagcccgaaaatggctcttaatacaaatccgacaatcgaaaggccaaatatgacaatggcagctagaaaaagaagtaagaataaaagtatatgcattgggctatgattttatgttgtaacttcgataaaactcatagtacaacaaacgtgccaagagattgtttatttactttttcttgtaaaaagtgaaagtaaaatataccagacaatgatcgctgcgaagctgctgatacctaagaaaacaaggaatgggatacatacaatcaagaaaatgaaactgattttatttgtattccatgaaagattcttgaatttcagcgagaacatcggtatctctgacaccagcaaccacgaaaacagacaaaccaataaaataaggtagacaggatggcagttctcggaaacgaggaagtcatgcgcccctactacgaacgatccccagaataaggcgtttgccggaacaggaagacctacgaaagaactggtctgccgggtatcattattgaatttagccagtcgtaacgctgagaatacggaaatcaaaaaggctgcgtatggcaggtaaggagcaagaaattccatatttgccggatagtacatctctttaaataaggagaatacaatcagtgagggagccacaccgaagctgacatcatctgcaagtgaatccaagtcttttccgatgattgagtgtgcattgagaatacgagccagcatgccatcgaaaaaatcgaagactgcactcagaacaataaaaagcagtgctaggtcataacgggcttcgaaagccatgacacaagcgatacaaccggagaaaaggttcaggcaggttactgtattcggaatattgttctttataacatttgtcattgtgaccgaattatttaagtttggcgataaccgtctggttaccggtcgttaattgtcccatgttgacacagacttccgtgccgaggggcagatatacatccacacgggaaccgaatttgataaagcccatgtgttcgtcgatatagcattcttctcctacttctgcgtaggtgacaatgcgtcgtgccacggctccggcgatttgtcgggtcagcacttccactccttccggagtttctatgactacggtagaacgttcgttctccgtactggctttaggcaaccatgctttcatgaagttaccgttgtggtgggctacctttttaatggtgccgtccaccggataccagttggcatgtacgttaacgatgctcatgaagatagagatcatcaaccggcggtcatggaagtattcgttttcgtccacttcttcaatgactacgattttgccgtcagcaggagcgacgactatcttttctgtatcctttccgaaaagtcggatcggacagcggaagaagttaaccatcagcagatatactgcaatactggctactgcaaccacataaaaaggaattttgcaatctattccccaataaagggccgcattaatcagtagcagtagcagaaagctagcccataatatatgtgttccttcgcggtgaatacgtatcttttttaatttctttagtcggcccatgaatgctgtttaatgatattgtgtgcaaaaatatacttattttaaaaaaacagcaagtaaatgagcagagaaatgcgagtgttgataactttttgaggattatttttgtttataacgcgggaggtagtaattttatgccttcaaattaactacttatcattatgcaggatttcgttcatttacacgttcatacgcaatattctctactggatggtcaggcaagtgtcgcccgtctggtagataaagccatgaaaaatgggatgaagggtattgccgtgaccgatcatggaaatatgttcggcatcaaggaatttacgaactatgtcaataagaagaatagcggtccgaaaggggaaatcaaggatctgaagaagcggattgcagggattgaagccggcacagtggagtgtgaggataaggaggcggagatagctgcctgcaaggcgaagatcgtggaggcggagaacaagctctttaaaccgattatcggttgtgagatgtacgtcgcccgccgtacgatggacttgaaagaagggaagccggaccaaagcggttatcacctgattgtacttgccaagaatgagaaaggttatcataaccttattaaattagtatcgcacgcgtggacgcgcgggtactatatgcgtccgcgtaccgaccgcagtgagctggagaagtatcacgaaggtctgattgtctgctcggcgtgtctgggtggcgaggtgccgaagcgtattaccgcagggcagtttgccgaagccgaagaagcgatccaatggtataagaacctgtttggtgatgactactatctggagatgcagcgtcataaggcgactgtaccccgtgccaatcatgaatgttatccgctacaggtaaatgtgaacaaatacttgcaggagtatgcccggaagtataatatcaagctgatctgcaccaacgacgttcactttgtggatgaagagaatgccgaggcacacgaccgtttgatctgcctgagtacgggtaaagacttggatgaccctagccgtatgctatataccaaacaggaatggatgaagacccgtgaagagatgaatgaactctttgcagatgttcccgaggcactgagcaatacgctggaaattctagataaagtcgaatattattcgattgaccatgcacctatcatgcctaccttcgctattcctgaagacttcggaacagaagaaggatatcgtgccaaatatacggagaaagacctgttcgatgagtttacacaggacgaaaatggtaatgtggtgctgagcgaagaggaaggacaggccaagatcaaacgtctggggggatatgagaaactgtatcgtatcaaacttgaaggcgactatctggcaaagttagcatttgacggtgcgaaaagaatatatggcgaccctttgtcggaagaagtgaaagaacggctcaacttcgagttgtacatcatgaaaacgatgggtttccccggatacttcttgatagtgcaggactttatcaatgccgcacgctcggaactgggcgtatcggtagggcccggacgtggttcggctgccggttcggcagtggcttactgtctgggtatcaccaagatcgaccctatccaatacgacttgctgttcgagcgtttcttgaatccggaccgtatttcgttgcccgatatcgatgtggacttcgatgacgacggtcgtggtgaagtgcttcgctgggtaaccaataaatatggtcaggaaaaagtagcgcatatcatcacgtatggtacgatggctaccaaactggctatcaaagacgttgcccgtgtacagaaacttcctctctcggagtccgaccgtctggcaaagctggtgccggataaaatccccgataagaagctgaacctgcggaatgccatcgaatacgtccccgaactgcaagcggctgaggcatcgtccgacccgttggtgcgagacactcttaagtatgccaaaatgcttgaaggtaatgttcgtggtaccggtgtgcatgcttgcggtacgattatctgtcgtgacgacatcaccgactgggtgcctgtaagtacggccgacgataaggaaacgggcgaaaagatgctcgttacccagtatgaaggttcggtgatcgaggataccggattgatcaagatggacttcctcggattgaaaacattgtctattattaaggaggcggttgagaatatccgtctgagtcgtagtctggagatagacgtagaccagatcgatattaccgatccggcaacttacaaattatatagtgacggacgtaccatcggaacgttccagtttgaatctgccggaatgcagaagtacctgcgcgaattgcagccttctaccttcgaagatttgatcgccatgaatgccctctatcgtccggggccgatggattatattccggacttcatcgaccgtaagcatggccgtaagccgattgaatatgacattccggtgatggagaaatatctgaaagatacgtatggcattacggtctatcaggaacaggtgatgcttttgtcacgtctgctggcggactttacccgtggtgagtccgatgcccttcgtaaagcgatgggtaagaagctgcgtgataagctggatcacatgaagcctaagtttatcgaaggcggacgcaagaacgggcatgacccgaaagtacttgaaaagatttggaccgactgggaaaagtttgcctcttatgcgttcaacaaatcgcacgctacttgctactcatgggtagcttatcagacagcctatctgaaagcaaactacccgtcggaatacatggcggctgtcatgagccgaagtttgtccaacattaccgatatcacgaagctgatggacgaatgcaaggcaatgggtatccagacgctcggtccggatgtgaatgagagtaacctgaagtttactgtcaaccacgacggtaatatccgtttcggactgggagcggtgaaaggcgtaggcgaagctgccgtgcaaagcattgtagaagaacgtaataccaacggaccattcaaaggtatctttgatttcgtacaacgtgtcaatctgaatgcctgcaataaaaagaatatggaatgtctggcgttggcgggaggtttcgacagtttccccgaattgaagcgggagcagtactttgccgtcaactctaagggcgaagtattcctcgaaaccttaatgcgatacggtaaccgctatcaggaagacaaaagagctgccatcaattcattgttcggcggagcgaatgtcgtcgatatcgccacccccgaaatacctcagggagtagagcgctggggcgacctcgaacgtctgaacaaggaacgcgacctggtaggtatctacctttccgcccatccgctggatgagttcgcgattgtgctggatcacgtctgcaatacccgtatggcagatttggaagataaggcggctttggcaggccgggagattacaatgggtggcattgtgaccagtgtccgtcgtggagtcagcaagaatggcaatccgtatggcattgccaagatcgaagattattcgggctctacggaaatacctttctggggaaatgactgggtgacttatcagggatatctgaatgaaggcacgttcctgtatatcaaagcccgttgtcaggccaagcaatggcggcaggacgaactggaagtcaagatcacttcaatggaacttctgcccgatgtgaaagaagaactggtgcagaagatcaccattatcattcctctgtcagtgttaaattcgggacttattaccgagctggccactttgaccaaagaacatcccggcaatacggaactctacttcaaggtgacggatgatacggacagccgtatgtcggtcgatctgatttcccgtccggtcaagctttcggtaggcagagatttaataacatatttaaaggagcgccccgaacttggattccgtataaattgattatctttgtagcgcaaatctacaaacgaagtaatacataataattaatacttaatacttaaaaagaaatggctttagaaattacagacagcaactataaggaaatccttgcagaaggaaagcctgttgtggtggatttttgggctccctggtgtggcccttgtaaaatggtggctcctattattgaagaattggccgcggagtttgaaggacaagtcatcatcggtaaatgcgatgtggatgataacagcgatgtggctgccgaatacggtatccgcaacattcctactgttttgttcttcaagaatggtgagattgtagacaagcaggtaggcgcagtcgccaaaccggtattcgtggaaaaagtgaagaaccttctctagactttgtctaatatttaatacttattacttaatacttacaaccatgggactggaagatgattttttattagaagatgccgatgacgaaaagaccgtcgagtttatcaagaactatctgcctcaggaactgaaagagaagttcgaggacgatgaactgtactattttctcgatctgatagacgagtactattcagaaagtggcattcttgacgctcagcccgataacgacggctacgtaaacattgacttggaagaggtcgtagcttacatcgtgaaagaagccaagaaggacgaaatgggagaatatgatcccgaagaaatcctttttgtggttcagggagaaatggaatatggaaactctctggggcaggtggactaattgtcgctagtcaccactgtagataaatgaaaggaatatagcctgaaagattcgcgtctttcaggctatttctttttccatccttatgttttcgctttccggtatttcctgccaagtaaattggcagtacctttgttctatagttttaaataaaacactttatgaagtacaacgaatcaattataattagagaatatctgccaacagataaagatgctataatgagtttaatcaagctgaatactcccgattttttcgcagaagaggaggcgaatgatttaagcaaatatttggatgaagaaatagaacaatactatgttttactcgttgatggagaaatcgttgggtgtggaggaataaattttgcagaaaacggcactatagggaaaataagttgggatatgatacatcccgcctttcaaggtaaatcattaggaacaaagctgttgaaacatagaattgaagtgctggaatctatctccagtgttgaaaagataaccgttaggacttcacaagtagcctatagattctatgaaaaacaagggtttgttttgaatgacattaaaaagaattattgggcggaaggatttgatatgtacagtatggagtataagagaatattaaaaagcaaccacaaagcttttattaatccgtaatttccattgctgtaaaattcagtctgtgttcctcagaatacactgtacctgctatctacttattttattaaatacccatgtgggaaatagtttcggggctttcagatttttagtatctttgttcgttgttttattgcgtatcactaaggtctgataattgaagcaccttggtgcttcaattgttgcacgtaggtgactctttcgttgcacctaagtgcaacgaaagaaaataaccaagcaaacgactaattgcttaaatagtaacagataagttattaacagccaaacataaaattattcttatgagcatttattacgacctttatgagaatccggataaagagggtaccgaagaacagaagttactgcatgcacgagtagtgccaagcggaacatatacaaccaaagagtttgtggagcgggtatccatgatgcaccatattcctcatgcgcaattagttggagcagtggaagctatcaccgacgagttgcagacgctgttgtccagaggatatattgtggagtttggagatttggggcatttttctctgaccctctctttggagaaagaaatcactgacagaaaagaagtgcgctctccatctgtccatctgaaaaatatcaaattaaaggtaaagcaaacatataagagagaactgaactctaaaatggatttagaacgaatatcttcccctacgcgttccaatatgaacatatcagaagaagaatgtctgaaaagattgcaggactttttggagaaacatccttgtatcaatcgggcagattattgtgctatcaccggaatgaataaaacacaggctatacggcaattgaatcttttcattgaaaagggagttattcagaaatatgggattgggaagacggtagtgtatatacgtgttgtgtaagttcttattttagatttcctccaatgcataatactgataatcccgaagtaccgtttggaggaacttctcctgattattctctcgtggagtaacagataagatttcctgcacctttttggcgagtaacgtaacgcgccttacccgatccttttcaccggactccagcgttcgggtgattacgttcacctgttccaatgataaatcggcagattgtggatacgtcggatgataattctttgtcagatagtcaaattcatcgaggctgacgtgtatcttgcgataattcttctctttgatcaccatcgttccggctgctaaatcacccagtctctgactgtttttagtcagcagaacgactaaaagccctaaacctcctgtaccgggaccatcaatgatgaagagaagccagcgcagcagataagcactgatgctgggagtagaaccgtctgattttacgacgcgtatattcatcagacgttttccgaaactctgcccgtgattgaacatttcgcagaggaacgagtaaaaaagtacaggcaaatagacgaggcacagaaaaaagaccgtaccgactccggaggataaatgcagtttaacaatgagtgtcgtcatagaatatagataaatcacaatcagggaataatcgatgaccaaagccagcaatcgttcgccgatactggcgggcgtttggctgattcgaacaaactgaccggtaataatcgtagattctgccattcttggttaaacatttttagatttaagttgcaaatatatcataattcttttacttttgcttccggtttcggacaaaacttatccgaaatctctgaaaagcatgaaggaagttacgtttatccgtcggaacattgaaaaatggaaagggaccgaaaaggtggtggaacaggctgcaaacctgtcccctgaccaacttgccgacacctatacggaactgactgccgacctggcttttgcacagacccatttcccgacttcccgcattaccatttatttgaataatctcgcttcagccctgcataatgaaatctatcggagcaagcgtgagaaatggacacgcattatcactttctggacacgggaagtgccgcagaccatgcatgatgcgcggcgtgagttactgatctcttttatcatctttgccgtcagtgcgttgatcggggcagtatctgccgccaatgatcaggagtttgtgcgtttgataatgggcaaccaatacgtagatatgacattggacaatattgccagaggtgagccgatggcagtatacaatggctctcccgaagcttcgatgtttctgggcattacaatcaataatataaaagtatccttcctgtgttttgccgcggggatactgaccagttttggtacggggcttatacttcttcagaatggaattatgctcggttcatttcagatgttcttttatcagcacgacctgctttgggagtcggcacttgccgtctggctgcacggaactcttgaaatatgggcgatcatcgtagccggtgctgccggacttgctttgggcaacggctggttgtttcccggcacctattcgagactcgaatctttccgcagaggagcgaaaagagggttgaagattgtaatcggtacggtgcccgtgtttatcatggcgggatttatcgaaggctttatcacccgtcacaccgaacttccggatatgctgaggctcggcatcatccttacatcccttgcatttatcatcttttactatatttatttaccaaatagaaaaaaacatggaatcacagaaacctaaggttgcaatgtacgtgaaacgttctttcggtgataagttgaacgcttcttttgacttcataaaagagaattggaaaatactgttgaagtttacgacttatctgcttttgcctgtaagccttattcaggcattaagtctgaacggactgatgggaggagcgtttgccatgactgctatgtccaagactgcgacggtgccggatactgcatctttattgggatttatgtcctattacggtctgtatatgattgtatttatgataggcagtattttgctgacctccatgatctatgcattgatccgtacttataatgaacgtgaagaacgcttggagggaatcacgttgggtattttgaagcctttattgttccgcaatatcaagagattgcttgtaatgacccttttctccatcttagtcatgcttttggtggggcttgtggtagggctgctggcgtttctgtcactattcaccttgtttctgaccattccgcttcttatcgcttttgtagtgccgcttgcattatgggcgcctatctacctgtttgaagatattacagtgatggagtctttcaaaaagacattccggctgggttttgccacttggggaggtgtcttcttgatatctctgatcatgggatttattgctaatgtattgcagggagtaactatgatgccgtggtatatcgctacgctggtgaaatatttcttctcattaagtgatgtcggaagcgagacgacagtatcggcaggatatagttttatcctttatctgcttggtattgtacaggcgttcggcgcttatctttccatgattttcacttttgtcggaatggcctaccagtacggtcatgcttccgaagtggtagatagtgtaactgtagagagcgatattgataatttcgataacctctaaacatatataattcagaatagatgctgacatccccggctgatacattggtttgcgacaccgtgcagattgccaaatggcaatccgaatcggcgtatgactacaatcgtgaactgataactcctgaaatcaatatctttgaatggtttcgcaggcagtttggggaattgttgcggaagatattcggcagccgttttgccgaagagtattccgaacttatattaatatgtctggccattattattctgctcctgattatatggtttgtttataagaagcgtccggagttattcatgcgttcgcccaagaataaactgccttatgaagtgggagaagatacgatttacggtgtggatttttcgggagggattgccgatgcgctttcccgttccgattatcgggaggcggtgcgtctgctttatttgcagacattgaaacggcttagcgacgagaaacgcattgactggcagccttataaaacaccgacacagtatatcaatgaagtacggatacccgttttccgtcagttgaccaatcatttcctgagggttcgttacggtaactttgaggcaacggaagaactgttcaattccatgaaatccttgcaggaagaaatagggaaaggagggggctcatgaggggaagccgctggtttatcttctttgtccttgcttttctgctgctgatgtttgccatagaatatcatctgccgaagaaatttgtatgggtgcctacctttagccattacgatgagcagcctttcggatgcgctgtgttcgacagtctgctgactgtttcactgccttcgggatatacactgtcccgaaagactttttatcagatggaacaggaagatactgttcacaataaaggaatactgctgattgccactaatttacctttcggacgggtggatatagaagccttgctcaaaatggcggatcggggaaataagatcatgctggtaagcagttcttttaccaagattctggaggatacgctgaagtttgattgtacttattcttatttcaggtcggtcgatctgaaaaaatatgccacttcgttattaaagcgggacagtatttattggatcggtgatccggaagtttattcacggcaggtgttccgtttttatccgcagttctgcaagtcctatttccgccgttatgattcgctgccggtacgtaaactggcggaggtcaatttggcaagcgatatggggcacgcattggatgaactggattctacgaccgtttcccgcaattatcatccgttggtggctatggttcgtccgtggggaaagggtgaaatcattctggtttctactcctttgctttttaccaattacggagtgctggatgagaaaaatgcgacttacatattccgcatcctgtcgcagatgggagaactgcctattgttcgcaccgaaggatatatgaaggagactgcacagacgcagcgatctcctttgcgttattttctgtcgcagaggccgcttcgctgggcgatctatctgtcgatgttcgctatcttgctctttatggtgtttacagcacggaggcggcaacgggcaatacctgtcatacaggaaccggaaaacaaatcccttgaatttaccaagttgataggcacgctttattatcagaagaatgaccatgccaatctggttcataagaagttcacctactttgcggaagtgctgagaagagaaattcaggtagatgtggaggaagtagcagacgatgaacgttctttccatcggatcgctcagaagacggggatggaggtggaagaaatcagcaggttaatccgcgaaatcagaccggtgatttatggaggacgtgttctttccggcgaagaaatgaagggatttattgataaaatgaatgaaataatcaatcatatttaaagaagatatttatggaagagaatacagaacaacgagtggatttaactctcttttccgagaagatacaggaattgaaggatcagattgcttccgttattgttggtcaggaacagacggtggacttggtgctggcagccatcctagccaatggtcacgtactgatagaaggcgtgccgggagttgcaaagacattgcttgcccgattgacggctcgtctgatcgatgcggacttcagccgtatccagtttacgccggacctgatgccgagcgacgtattgggtaccactgtgttcaatatgaaaaccaatgattttgactttcatcagggaccgatctttgccgatatcgtattggtggacgagatcaaccgtgctcctgccaaaacgcaggctgccttgttcgaggtgatggaagagcgtcagataagcattgacggcattactcataagatgggtgagctctataccatccttgccacacagaaccctgtggaacaggaaggaacttataaacttcccgaagcgcagctcgaccgctttctgatgaaaataacgatggactatccttcgctggaagaagaagtggatattctggaacgtcaccatacgaacacttcattaatcaggctggacgatatcaagcctgctatcaccaaagaagaacttctgtcactgcgtgccttcatgaatcaggtatttgtagaccgtacgctgctccaatacattgcattgattgtgcagcagacgcgtaccagcaaagctgtatatcttggcgcttctccgcgtgcatcagttgcaatgttgcaagcctccaaggcgtatgcccttttgcagggacgtgacttcgtgacaccggaagatattaagttcgttgctccgtatgtgcttcagcatcgtctgatcctgacggcggaagcggaaatggaaggatattctccggtaaaggttacgcaacgtctgattgataaagtagaggtccccaaataagaaccgaatctctataatttgtaactcaaaacttaaaactcaaaactcagaacccgaaattgtacttaacccgtcgtttctatattgcccttattctggttatcctcttattgggtagcggatatctgtttgctccgttttttgtcatcgggcagtgggcgctttttgccttattcgtgttggtatcggcagacggatatattctctaccgtacccaggggattcaggcattccgtcgatgttccgaccgtttctccaatggcgatgacaatgaagtgagcattcgtgtcgaaagtacttattcgtgtcctctctctctggagatcatagatgaaataccttttatcttccagaatcgggatgtctgtttccggaccacccttcagccgaacgaggggaaaacaatcagttaccatcttcgtccgacccgtcgcggagtatattctttcgggcaaatccgtgtatttgtgaccgacaagatcgggctgctttcccgtcggtacacttgtggacagccgcaggatatcaaggtatatccttcctatctgatgcttcaccgatacgaattgctggcaatgagtgataaccttaccgaactgggtatcaagcgtatccgccgggtaggccatcaaacggaatttgagcagatcaaggaatatgtaaagggagacgactaccggactatcaactggaaagcgagtgcccgccggcatgagctgatggtaaatgtctatcaggacgaacgctctcagcagatttacagtgtgatagataaaggcagggtgatgcagcaggcttttcggggaatgactttgctcgattatgcgattaatgcttcactggtgctctcgtatgtggcgatgcggaaggaggataaagcggggctggtgacttttgacgagcattttgataccttcgttccggcttccaagcagcccggacatatgcagacgctgcttgaaaaactgtatagccagcagactactttcggtgaaacggacttctcggctctttgtgtgcatctgaacaagcacgtcaataaacgtagctttttggttctgtataccaactttgccagtatcagcagcatgaatcgccagttggcttacttgcagcagctcaaccggcaacatcgtttgctggtggttttctttgaagatgctgacttgaaagcgtacatcgaaagtccggcgagggatacggaagattattaccggcacgtgattgccgaaaagtttgcttttgagaagcgactgatcgtttctacattaaagcagcatggcatttactctctgctgacgacacccgaaaatctgtctattgacgtaatcaataaatatttggagatgaaatcacggcaactactgtagtaagagtcgttgattggtctgatgtagttcttttatttccttatcgggcttcttgtttgtttagaaaaggggttgccccattgcctttcgtgtttctacaaagaagaatacagccattcctattataatgactcccagtatgccgtaaaagagccgtgctctgccgcgacctacattccggacgattgtctgggcattgcgtgtggtgaagaaccagttccagttcagtaaggaagctagcagggaagtgattcccgctagcgcaaaaattccttgtacgatgtattgtccggtcatagtctgatcactctgcttccgtcttccagttcttcaatcgtcacttttacggcatctcccggcagtaattcttctaccagttccggccattcgataaagcaaagggcgccgctatagaaataatcttcgtatcccatgtcatatacttcacttagctttttgatgcggtaaaaatcgaagtgataaatcaattctccggtttcgtccgaacgatattcgttaacgatagcgaaagtaggagaactgataacgtctgatacacctaattcctcgcaaagagctttgacgaaggtcgttttgccggctcccattttaccatataaagcgaaaacggtgttatcacccatagcagcgataaattcccgggctgcctcatggatactttccagtgattgaatcttgatttccatatactattctattattatgactgtttcttgcaacaactctttccgatcttgcaaacggcataaatcaggatagagaagaatataatcgaagcgcccgaagggactttccagtggtaagaaataaacagaccgcccagacagcccagaaaaccgataccgatggacagccagatgattttcttgaaactgtaggtaaagaggttggccgtcatttgtggaatggtgagtagcgatattgcgagaacgatgcctaccatacgcagacaagcgacgatggtcaacgcaataaacatcatcagcacatattcgaatatctctaccggaatcttttgcgaacgggcaaactcgcggtcgaatgcaatatatacgataggacggataaacagataaaagaatccggttaatatcagagccaatatgcccagcatccacaagtccgcctgattgatggtcaggatattaccgaaaagataagctgacaagtccggagcaaatcccggtgacaggaaactgaacatgattcccaaagccattcccagcgtccagaatacggcaatcgcagaatcttcacgcatatctttccgccggctcagccactcgacaccgaatgcggacaatacagagaagacggcggctgagagtatgggagaaattcccgcaaacagtcccagtcctatccctccgaaagaggcgtgcgtgattcctccactgataaataccagacggcgggtaacaatgtaagtaccgataatcccgcaggcaatgcttgccagtaagctgcccagcaaagcgtgttggaagaatgtatatcgaagtagatccactttttaattaaaaattaaagattgaaaattaaaaatcaaagcaagaataatgccgtccatcaataaaaacaacttcaacgccctcctaatacctattacttaatacctattacctctccccattccttctctctccgataatcagaaagacttcatctttgaggtcatccggcaactcgataccccgtagttgcaaactacgtacccagcctgcgacatcaatgtcctgcatggtatataacacatccctgaattggtttgtttcttcgtcagtatacgcatttgcttcctttccgatgaactgatccagttcttcgtcatcgtaatattcaatttttttgcttacggcggcaagcaaactatctttctcgcacacttcgtgttgtccgcagcattctatatctgcttctttcacttccggcatacggtccagttcacctttttctattttctgttgcagtcttttgttgcggatataaccggctatcaatgcgatgatacctagcaacaccaaacttataataagtatccacatagtctgtactgattcaaatttctgcaaagttacttattaatttgcattctatcatggatggtatctatttcttttcttacttttgcacgttgctaacttaaatatatattagacgatgaagcataagaagtggttgactgtcttatttatacacggtaacaggagaagatatcaggtaagtatatgggcggaaggaaatggctgggtgatagaaaaaggtgcggattaaagaaagaaacagccggaactgtagggtaccgacaaaggtgattttcatctgcttaggcggttatttaaaataatcctgtatatttgtgataataaatcgaaagactatgatacgacgtaggctttgcctcttattcctactgactggaatgactctgtttgcttattcgcaaggattgttgtttcaggctaatgataaagaaattaaagaaaggacttctcttcagatatttcaggaaggggagataccttgttttacgaaaaactttcagttgagctttgaactttctattcgcgattttgatacttttggatatgtttttctgctgaaggaagatcagggaaagaccaaatatagctttacgtatacttatctggatggtgagaacagtacattcaagtttaataccgacggaaaagagaatcattattctttaaatctgcgcaatgatgcactggcttatcaatggattcctgtgtcttttgcattcgatttgcaacaggacgtacttacgattcgtatcggagataacgaaaagaagattacttctttaggattgaaagatactttttgtccgcacctcttcttcggacgttatgattatattttggatatgcccacttttgccatccgcaatctgaagctggaaggtgatagaagtcattcatatactttccctctgaatgaaaatgaaggggaagaagtgcatacttctacagggaaggttttgggtacggttgtcaatccggtgtggctcatcaacggttcttatcattgggagaaactttttgagtattcttttcagactccttcgggaatcacttttgagccggacagtcagcgactgattattttcagccaggattcacttcttacttataatctgttgaaacgtcagccacaaaagtattcttatagcaacaaactacccgtaaaattgcagttggctactcacttcatgaatacaacggatggtaaactttatgtttatgaattgaataacctgccgttgggggatgctacggtagcggcgctcgatctgaataatcaggagtggaaacagaccggagtagcagccttgccggtacagttgcaccatcatgacggcttttgggatgaaacaaccgggaagtatctcgtttttggcggttttggtaataagcgttttaataatacattcctcgaatatgatatcgagggcgaccgttgggataccctttcttattccggcgaccggattatcccccgttatttctcgggtatggcagtcaataagaaccgggagcatatctatgtctttggcgggatgggaaatgaatcgggtgagcagagtgtaggccgaaattatcttcacgatctttatctgcttgacagaaagcagcagtctgtgcgacgtttgtggcagaacgcttcggatcatcgtttggtcgtcgcccgtgatatgatactgacccctgatgagaagtatatctatgctctgtgttatccggaatatctttcggatacctatctgcaactttatcgcttgacggttgatgatggaacgatgaaagctttgggagattccattccgatgcgttcggaagagattatgacgaatgctaacctttactataattcattgacgcatgagtattactgtacgaccacggaatttgacaagaagggacatacggtgattcggacttatgtgctgtccgcccctccggtttctctggatgaaatccgttcttacggttccaggtcttctctggagattcgttggttatggataatggcaggaataggagtattattgcttgccggaggtgtgctgtttgtcaggaaaaagaggggaaaacaaagaaatgcggttctggaatcatcttctgtgctcatgtcaccacctgtcgggagagaaccggataaaagtgtacagggaaaagaaacgcttgcaaaagaagattttgagtcatccctcgttcgtccgaatgcagtttatttatttggtccttttacggtaattgaccggaatgggcgggatattactcatttgttcagttcccgtttacggcaggttttcatctatatcttgcttcatagtactcataatggagtattatccgcctccttaaatgaggtcttctggcccgataaacccgacgacaaggtgaaaaacctgaaaggggtaacgatcaatcagattcgtaaaaatctggctgaactggatggagtggaacttgtacacgacaagggatatttcagactggtgtttactgactgttattgtgattatttccgtttccgcaccttgaagaatgctgaagaggtcgagaatgaactcggcattttattaatgcgtggcaaattccttgatggtatggatgcagggatgatggatcacttcaagcaaaaagtagaagagttcttgtcttccttcctgccattggaaatcgaacgtctgtatcagcagcataagtatgatgccgtcattcgtttctgtaatgtgcttttccgggttgatccggttaatgagctggcactggcttatggtatgcatgcccttaaccatacaggttcgtcacaagaagcgattctgcaatattccctgtttgtgcgtgagtacaggcaaatgatgaatgaagaatattctacttcctatgcagaactgatgagcaaaaatcctccttttcatcgataaaaacatatcggttaatgatatttattcgcttattaatccgttattaacccatcactaataagttgtttaaccttgctacattatgtttgcagcgatgttatttacttattgttttatttaaaaacctaatacgtatgaaaacaagattctttatgaaactttgtttattcagtttgttggtttggtgtgtcagctcgtgcaagagcgataacggcgattcagtgcggcctattgcacttgaatgcatgtacacgcatctgaccgacatgacaaacatgcttgataccgcaaagatcggtacaagtgacggtactttcccattggcaaatgcccagaacctgcaaaaagctgttgaagaactgcaaacaggtatttctaaaggtatggctggctactttgttctacagtatgaaatagataactactgtatagccgccgaaaaagcgattgccgaatttcaggattcctatcaacagacattgcaaccgggtacgcctgccgaattaaaggtattcggcattgacggtaaagggcgtattgaatttggttccgatcctgcttatggtggcggtaatactttcaccgtagaaagttgggtgaagtatgatgccggtttctttgagtcgggaattggcagtttcctctctacttttgacggtaagcagccgaatgagggatggatgatcaacttcttaggctctaatcttcgtacaacgatcggtatgggaccacaggaaggccgtgtactggaagaaggccgcgcttatcctgataattttggcaaatggaatcatgtcgtgacggtgtgggataatactttgcctgaaggacagctgaaaatgtatgtcaatggtgaattattcttcagtaagacaaatgatgtgaagaatgatgccggagtattacagaattatatgcctaacacccgtaaccagaatatgtgggcattccaggaaccgactgacaattcacgctgtatgaccggatttattaagaaattccgcatgtggagtactgcgaaatcggcgaatgaggtaaaaacgctgatgaactcggatgtgacgggaacagaaagcggactggtatgtgcgtgggacttcacgacagtggccgaagacgttaccaacattccggataagacaggaaaacacgttgcgaaaattgtaggtaactacaaatggtttaaagttgagaactaaccttaataaacagacgaagagtatgaaaaataatacgataaaaataaaggctttcctctgtctgctacttctgacgtacggatgggtaagtgtgcaggcacagcaggtgcttacagtgaaaggtgtggtagtagatgctttaaaagaaccgttgcccggagccagtgttcaggtggtaggaatgtctactggtacggtgactgacttggatggtaattttagtcttcaggttccgaaaggaaaaacgattgctgtttcttttataggatacgtaacgcaggaactgactgtaaaccagaatcagtcaaaccttaccattcagttgaaagatgactctaaacagttgaatgaagtagtcgtcatcggttatggtacggtagaaaagaaagatttgacaggttctatccaatccgttaccagcaaagaattaagtaaactggtgactaccgatgtcactgaaacactgaacgggcgtgtcggtggtgtacttgtgaacaagacttccaaccgtcccggttcggatacgaaaatagagattcgcggtatcaactcgttcaatttctcgaatgaacctttgtacgtgatcgacggagtaccttcccaaacaggaatgcgtcatctgaactctgccgatattgaatctatcgacatcttgaaagatgcgtcttccagtgcaatctacggttcgcggggtgcaaacggggtggtgattatcactaccaaaggagctaacaagcgtcagggctttaatatcgactattcgggttacgttggtttcaagactcctacccgtattcctgaaatgattggtaacatgggcaatggactggaatatgtagactatcgcaccgctttgtggaaaaagaagtatggtgatgcttcactgagccgtccggactttctgactgatgacgagaaacgccgtatcaaacatggtgaatactatgactggttgcgtgaactgtcgcagaatgcattgactaccagtcattctgtttccgctaccggaggtacggataaactatctttctcattcggcttgggatacttgaaggatgacggtatggtaggcgatgaaagttttgaacgtattacggctaatgtggggttggaatatcgtttttctgataaattcaaaacagggattaacagctatgtttctctgaataacacgaatgaaggagccaatgatgctttgattaatgcatacttcctgccgcctacggtcagcccgtacgataaggacggaagctacctgtttaattgtcagccgacttccagcaagatcaacccatttgttcagattgaaaataataaaagagagaaagaagcaaactataccaacttctccggttatttggaatatcagccgatcaaaggactgagctttaaatcacagattgcggttcagtatgattcggatgtttacggagaatgggtaggtacgatgacacaagccaaaggaggtctcaatgcaccggaagcttaccggaaagaaggacggaatatgaactgggtatgggacaatatcattacttatgataaaacctggaagaatattcatcgtctgaatgctatcggtttgtatagcgtacagaaagaaactcataagggttccgaaatgcgtggtgacggtctgccttacaactcggactggcatgcgatcgaaacagccgaagaaattcgtgatgtgaagagttactattgggagtcatccatgctttcttccatgggacgtgtcaactatacgttgatggatcggtacttgtttactgtaacagggcgatatgacggaacttcccgtctggctaccggcaatcagtggggatttatgccgtcggcagctgtcggctggcagatgaagaatgagaatttcctgaaaaacgtagactggctgaatagtctgaaattccgcgtcagctggggtaaatcgggaaacaacagtattgaccatgatattacctggacaaagctggacctgactcattatatctatggaggtaaaggtgaaaatgctttcggattaggcgaccgcaaaggtaacaaagatcttcgttgggagatgacctcggagtggaactacggtattgatttcggcttcctgaataaccgtatcaacggtacgattgatgtgtataaccgtactacgaaagatttgattttcgcccgttcggtaggtaacctcaacggttatggctctatccttgagaatataggaacgtcctccaataaaggggtggaaataggtctgaacacggtgaacatctcaaaaaaggacttcacatggaagacaaatctgactttctctctgaaccgtaataagattgtagacctctacggtgataaaaaggatgacttggctaaccgttggttcatcggtcagccgatgaaagtgatctatgatctggaaaaggtaggaatctggcagacggaagacaaggaactggctgctaaatatggacaagtaccgggacatatccgtgtagctgatctggacgagaactatgtgattgatgaacgtgactataaagtactcggctctccgtcacccgactggacagcgggtatgaccaatacctttacttacaagaactgggatttgtctttctatatgtatgcacgtatcggtggtacctacaatgatgatttcacttatatgtttaccgcatgggataatgaacactggaacaagctgaatgtgaagtactggactccggaaaaccacagtaatgaataccagcagatcggtgcgcaatcctaccatactcaggtattaggtaagatttccggttcgttcctgaaaatgcagaatattacgttgggatatactcttccggaaaactggatgaagaagatgaaaatgaaaaatgcacgtgcctacatcaatgtgcagaatccgtttactttcaccgactatctcggtccggatcccgaaacgattggtgaagacgtatacaagtctttgtcgctttatccgatgacatttacttttggagtgaatttaaccttctaaatgcttgaaaccttatgaaacgagtaaaagaacaaattaaatatttggcactgttagcaatctgtttgctaagcggatgctccgattttctggatagttataacccttcggcagtaacggacgatttctataatactaaagaaggacaacagaaattgttgacagatatcaatgcccgttaccgcaatgttttcaatacaggcgaattgcagtattacggaactgatatctacatggctatctccgaagaacctgccgaacgtatgttcaacggctatgacaagactttcaactccaccgctccgattgtaggcgattattggaaagtactctataaggttgtgcaggaaagtaacatcctgctgaatcgttgcacaccggatattgcaggaagcgattatacttcgctgaccgcacaagcccgctttttccgggcgatggcttactattatctggtagaaacattcggccccgtacctttgctcaccgaagagaatacaagcgttatccagcaggcggaacgtaccggtgaacaggctatttacactttcatcattaccgaactgaatgatataaaggacaaattggagatgaccacgatttcagccggaaaggtaacgaacgccgcagtcattcattttttagggaaaatgtatctgacacgtgcttacaaatcctttgctgaaacagacgacttctccaatgcagcaacgacatttgatttgctggtagagaatccggcttccggttatgctttgcaggaaaactatgctgctttgttcgatgaaaacaatcaggctaattcggaagtaatctgggcgattcaatatggactggataagaactatcggggtgatggaaatccgcaacaggcacagttcggatttaacattgtagcattggagccggatctgttcattaagaatcagaatgattattctagtgtttcccgtaaatactgggtgaatccgaaagcgcacgagctttataccgacccggaagcggatacccgttatgatgcgacgttcaaacgtgaatattacataaacaatccggataatgctgattacggtaagctgggaatctatttcccccgttggaacgataaatcgggtatgagtaataatgcgaaaagattttatccgttcaagcaggacgatgaatatgtatggtatccgcaatctacggcacttcctgtattggaaactgcttcagatcgtatgccgatggtacggaagttcagcgataccaagatacaatggggcgaaggcggctctcgtgaagatgtcattttccgcttgggggatacctacctgttgtgtgctgaggcttatctgggtgccggaaacaagaaactggcattggaacgcatcaacagtatacgtaagcgtgccgctaaagatgcgaccgcttatgaagcaatgaagttgacggatctggatataaatgttatcatggatgaacgtgcccgtgaattgatgggagagcatgaccgctggtttgacttgaaacgtactcagacactgctgacacgtgtacccgcatacaatccgtttgtggtgaaatatgataatttgaacaagaaccatctggtacgacccattccgcaagatgaacggaacaaggtagatggattatctcagaatgaaggttattgattaatggttaactaacaaatgaaagaagtaattatgaaaacgactatatgtggcgctgcactgttgctcagcctgacaatggctagttgtgaagtgtacgaatcaccggaaatcaatcaaggattgaacgaagaaaacaacacgtccctttatacagatgcttatgacccgatcagtaatgtggggcaatactatatgccggaaatgaaggtgaaaccgaagaagtactggaattgtgtggaagttgtaacggtaggcagccgtaatgagctgggacaaacagagaaagtacgcggattgcagtaccacctgatgtgtcagtcattggccggtctggctaatcgtgccgtagaacagggaacaagtgaaatagctgtttggctgcacgatcacggtggcagtgattcctataaactgtctaagcaggcactcgaagatatgggtatccacgaacaggggatgcagagcggactggaactggcacgtaatgattatggtccgtccgacggagtgactattcagttgaaaggaatgttcgacggatatgtcttgacggatattgagcataatccggagagtggtgtcgtagcatctgttgcttctcatgtttataattctattattgtggatgtccgtgacaaggaatattatgaagaagcaggatataccatgaaatatgatgcaagaagcaagactactgcgcaggcatgggcggagttcaaagataaatgcagcaacaaagctttggtgatcatgcctgtacaaaccggtgaattgcgtgagtttgccattaagaatgaacttttcgtattgaacttgaataagcgtcagggaacttcgatagccggacaaaacacagctttgctgaaagaaatccttgcctggttggaaccgaatgcacctgtctacggatgggaacagggagtcagtgaagatgcttttgttgatttggtttccaagagcggtcatccgatgatcccttgtgattggagttacaatcactccttgacttctttgctttattctcaacgtcagaaatcgacattggtccgcgtgaagaatccgcagtttctggattatacaaagaaaaagaatttcgtttctttcttcctttccgatggtgacaatatccagtggatgatgaatgactttaaagatttctataatgcggcggagtcggaagaagtacggatgacgtatggtattgctgcttcagtgcttccgatgatggcaccggcacaattctataatctgttgagtcagcaaaagccgaattgctctattttggaaatgctgggaggcggttactattacgtagacaattatagcgagaatggtgaccgggcgaagaatctgcaagtcgtggcagaacgcctttcggcgcatatgcgtcaacatcgtgtgaaactgttgggtgtaatggctatgaatgtaaaatcagaagctgccaaagaagcatttcaggcttatgtagatgccaatgaccagttggaaggtatcgtagcgcttcagtatagcccttatgcaggaggtgaaggagacgttatttgggtaacgaataaagcaggatatgatatcccggtcattacggtgaaatactctttgtggaattttggaaaccggaatgcggaacgtgaaggtacccctgcctatattgccggaagattgaaacaggaagcacagcaggaaagtttttctgtagtatgtgtgcatgcatggagtaatttctccgatcacggacagacggaagatcccctgattgagaaccagtctggagatattcgtggagccggagcggcaaagctttgtgcaggacatctgaacgatagttttgaagtagtaaatatgcaggaactggtatggcgtttgcgtatgagccagcgtctggaacagacgaagaagtatctgagtgaggtattttaattaactagagtttcacaggctctctgtatggctttctcttttcaaacgtggaaggagaaagccatacagaaggcttgtgaaacttaagcaaataataatagatatggttgcaagattgtttttcttatcaatctgtcttccttttctgctcacctcgtgtcagcagtcaaagaagacagtagagtttgtagactacgtgaatcctctgatgggtaccgaatctacttttgcgttttcgcatggtaatacttatcctgctgtggcagtgccttggggaatgaatttctggagcccgcagaccggggagaatggcagtggatggatgtatacgtatgccgatagtctgatgcgcggcttccggcagacacatcagcctagtccttggatgaatgattatggtaccttttccattatgccgcttgccggagaactgaaaatgagtcataaagaacgtctggttcctttctcacatcaacaggaaaaagcgactccttataattatagtgttacattcgataacggattgcagacttctctttctgctacttcccgtggagctgtattcgaagtctctttcccagaaaaagaagaccagtatgtagtggtggatgcataccacggaggaagttcaataacgattgaaccggaaaaccggttggtaaaaggtgcgacacgatataataacggaggtgtaccggataactttgctaattactttatgatggaattcagtcatcccgtcatagaatacggcacttacaatggagatactctgctgcaccatcaaaccgatgtagcggccgattatacctgtgcctatctgaaatttgatgttccggtaggtgaaaaactgaccatacgtacagcctcttcttttatcagtcccgaacaggctgccatcaactttaatcgtgaagtagccgatgcggatgtacaattgatcagcgggaaagcccgtgaacagtggaataactatctcggacgtgtagaagcggaaggaggaacagacgaacaatttcgtaccttctattcctgcctgtatcgtacgttacttttcccgcgtgagttctatgagtttgattcacaaggaaatcctgtttattacagtccttatgacggtaacgtgcatgatggttatatgtataccgataatggtttctgggatacgttccgtgcggttcatccgttgttcacgttactttatccggaggtttcggaacgcgtgacgcaatctatccttaatgcttatgatgaaagtggttttatgccggaatgggcgagccccggtcatcgtggttgcatgattggcaataactctgtttccttattggtcgatgcatggatgaaggggatacaaatggtagatgccgaaaaagctttggaagcgatgattcatcagacacaggcccgccacgcggaaatagcttctgtaggacgtgacggcttcgagtattatgataagctcggctatgtaccttatccggaagttcccgaagctacagccaaaacactcgaatatgcttatgctgactggtgtatcgcccgctttgcgcaatcgctgggtaaacaggatatcgcagaccagtattatcagaaagcccagaattaccgcaatctgtattatccggaacatggttttatgtggactaaggatgccaaaggcaattggcgtgatcgttttgatgctacggaatggggcggtcctttcacagaaggaagttcctggcactggacttggagcgtatttcacgatccggaaggtttatctgaactgatgggcggacatgaaccgatggtagcccgtctcgactctatgtttgtggccccgaacacttataattatggaacctatggtttcgttatccacgaaatagctgagatggttgccttaaacatgggacaatatgcgcatggcaatcaaccggtgcagcatgccatttacttgtatgattatatcggtcaaccttggaaaacacagtaccatctccgtaatgttatggataaactctacaattccggaagtaaaggatactgtggcgacgaggacaacgggcagacatctgcttggtatgtattttctgctatgggtttctatccggtttgtccgggaatgcctgaatatgcggtaggttctccgttatttaaaaaggtaactctgcatcttcccgaagggaaaaacttcgtcgtttcagcagcagataatgcggcagaccgtccatacataaggaaagctctgttgaatggacaagaattcacacgcaactatctgacgcatgatgaactgaaacagggcggagaactgaatctgtcaatggacagcgtaccgaatcagcaaagaggtacccaaccggcagacttcccatattcttattccaagtagtttcaataggttttagtatacttttcattgaccgatacggagagaatcttaattgatttgatctgtatcggtcatacaataggaatttaaagtcaggctttgtctttgctgtttcttttgttacctttgtgcatctaatatgaggtttatgatacattctcttccatcttccgaacccttgacggcacaaaagcttttctcaaagctttatgtttcctactatgcccgtttggttcgtttcgcttccctttatgtaggagctatgggagacgcagagaatatagtacaagattttttcctctatttatgggaacgtaaagagatacttccggaactgcaacagcccgatgcatatcttttctccgctgtcaagcatcgttgtctgaacttccttcgttcacaactttctatagtagaccgcaggcagccgctttctgatattatggagcaggagtttaaactgaaactttatagcctgcaactacttgatgattcccaaatgtcgatagacgaagtagaaaaacagatctgccgtgcaattgataacttaccggaacgttgccgagaaatatttgtcatgagtaaactaaaaggaatgaaataccgtgagatagccggagcactcggcatttcgcagaatacggtagaaggtcaaatggctatcgcattaaaaaaacttagggaagagttgcgtcattgtctgcctttgctgcttctattgagcgtataaggataaatcgcctatgtattgtctttgcttcagtccattccatatactttagtcaagctgagtactaatttgcagcttataatgaatgaatttagttccggttgcttataaatctattcgtctgacagttgttgaactttcgtctgacaattgttatcttttcgtctaacaactgtcagacgaaagttcaacaactgtcagacgattaaatttaagtataatgaatactaaatctgtgtacatcaagaattaaatcttagagtaaatccgaacagattagttcgtttcaaaacagttcttagcttaaacttattggattttacttcccttccttgattttttttcattttcctttggtggtaaatgtaagttgctgtgtcttcttattaaaagcgcgcaatatgatgaatgagaaatggaatcaatactttttcggagaaccgaccgaagaggaaaaacgggagctttttcaggaactggaaaagaacgaagatatgaaacgggaatttgcagaaatgcaaaatatcgtaggtctgtccggattattacccagagaagatgattctttgaaaggcgaacggaatctggaagcaatgatgaaccgtcaggagaaaaagctgaggcggaaacgggtgttgcaaatcgtgcggtatactacttcggcagccgctatgattgctctgacgtggatgctcgcctggtatatgtttgttggctcggagactccttcttatacggagattacagttccgaaagggcaacgggtacatttaacccttccggatggtagtgaggcatggttgagttcgctttctacgttgaagtggccttctgttttttcgtccgatgcccgtacggtagaactggatggagagggttttttcactgtgacaaaggatgcttcccgtccttttacagtgcagacgcaaaagtatgatgtaagagtgcttggtacggaatttaatgtgtatgcttatagtaacagtgagaagtttgagacagacttgctctcgggtaaagtgagggttagctctaccggatttccagaagaatcggtgaatttattgcctgacgagaaagtgtctttggtagatggaaaactggtaaagtcttcttctcattttggaggaaaggaatatcgtgaacaaggaatttatgactttgaagaattaccgttgggcgaagtgctggaaagattggagcaatggtatgatattcattttactgtagatgatccatctctgttgagtaagattatttcgggtaagttccggcaaagcgatcagattgaaacgattctgaaagcaattagccgtgcggacttatttgagtacaaaatactgtcacagcgagagataacgatatattaataatctgattaaaatttaatgcctatgtaacacaacggagtagaataaaacgaaagtaaatagacatcaaaatgaggaataaaaagggggaaagtggtgcaacactctccccaattcctcagctattaatactttctctgtttcacgtttttgtgaacctaaaataaagtactaacaaaatcacttagcaaagttatgaaaaaaatcttttcactgctcgctttggtcctgtttattaacctttttacataccagacccaggcacagacagcagttgtgaatattaataaaacttcggtttcgctaaaagaactgattcaagaagtcgaaaaacaggccggatatttgtttgtctacggaaaagacatcaatatcgaacagaaagtaaaaatcaatgcccggaataaacaggtaaaagcattgcttgaaaatgtattgccgcaaatagggctgacgtatgaatacgccgacaattacatctcattgaagaaaacgcaggtagagaaaaaatcaataggtaaaaaaataatagtcaaaggaaccgtagtagacaaaagtggcgagcctattatcggagctaacatcatggagcagggaagtgcttctaatggtacgatcacagatatcgatggtaaattcacgttatccttgccttccaattcggtattagcggttacgtatgtgggtttttccacaaagaatattccggtgaacaatcagaatgccattcagattgtgatggaagaagattctgaaattctggaagaagtagtggttgtggcttacggtacgcagaagaagatttcttctacagctgctgtatcaagcatgaagactaaagatgtagcgcaaaagccggttatcaatatttctaatagtttggcaggtcgtatggcgggagtcattgcaaaacaaggatcgggagaaccgggagctgatggttctgatttgagaatccgtggtgtggctacattagggaaccaatctccattggtcgtagtggatggagttccccgtgacttttcacgtatcgatccgaatatgatcgaggatattactatcctgaaagatgcagctgccgtagctccttatggtatggccggtgccaatggggtagtattggtaacaacaaaaaagggaaaaagcggtgctccggtactttcatacaatggatatatcggttttcagaacccgacccgcatcactgaccaggttaattcgtatgaatatgctttgatgaaaaacgaagcggctatgaatgcaggttatcccaattattatgcctactcacagcatgatctggaaatgtaccggaaaacctgtgccggagaccccgatgccgatcctgaccgttatcctaatagcaacggtctgcgtgacttggtacaaaacaattctgtgattacgaatcacaacttgcaattatccggtggtagcgataaattccagtactacgtatctttaggatattcttatcaggaaggaatgtggagtactaccgattaccagcgttttaatctgctggctaatttaagcgtggatgccaccaaatatacgaaaatcagtttaagtctgggtggatggcacgaaaagaagaattatccgggtgccgatacaggcgacatcatgtatcaggcatatcgtacacctcctatctctgctatacagtactcgaatggtctgtggggacaatatgtaggtaagtcacttttcgggctgacctatcgtagcggatatcgtcaggagccggccgaccaactgaatacttctctctccatagagcaacagcttcccttcattcaagggttaagcatcaaaggagtaatcaactacgacccgtatcgtgtgaagaaaaagaaatatctgacaccgatacctgtatacacactggatgcatcacaaactccgtatcaattcgtggaaggattccagggaccggagaaaccgaatctggaacaatcgtttgaagaaagcgtgagcatgacttatcagggaatgattaattactcacggactttcggcaagcatacggttaccggactcggagttattgaagcacgcgaaagaaacgtatggaatatgagtgccaaacgtctgaattataatattaacatagatgaaatcaatgcgggaagcagtgaccctgccgatatcagcaacggtggtacgtcttggaaagaacgtcaggtaggttatgcattccgtttgggatataattatgataaccgttatatggcggaagtttccggtcgttatgacggacactactattttgctccaggcaaacgttttggtttcttccctgctttctcactgggatggaacttgcgggaagaatcctttatgaaagatgtcgaatggatggataaactgaaattgcgtctttcttatggtgagtccggaaacttggctggtagttcctatcaatatatgagtgattacggattcggaaacgctgtaaactttggcggtgtacctatgatgggtatgtgggagaacttgcaggggaacccgaacattacttgggagaaagctaagaagtttgacttcggtgtggagttttccgtattgaacggtatgttttctctggaagctgactatttctatgagaagcgttcgaatatgctgatggctccgaatgcattggttccggcagaatatggtattcctttgtcacaggtcaatgcgggaagtatgcacaatcaaggtattgatttatctctgaatttcaacaaacgtatcggcaaagactggatgatcagtgcaaaaggtactttcactttcgcacgtaatattctggatgaagtatttgagacggaagccaccttcaataatccgaatcgtcgcagaacaggacgtcccgacggaacaatgttcggatacaatgctttggggtactttacttatgacgacttcaatcctgacggttccttaaaggccggcatcgctactcaaccttggggacaggtatatccgggtgatttgcgctacgaagatttaagcggtcctaacggcgtgcctgatggaaagattgacgaacacgaccagacagtgatcggcttctctaactgggcgcccgaaattattttcggtctggctcctactgtccaatggaagaacttcgacctgaacgcattgattcaaggggctacccgtaccagcatttcattgggggagactttggtaatgcctttctttgattccggttcggctactaagttacaattcagtgatcactggacgccggataacacgaacgcaccttatccccgtctgaccagtgaagtaacggtgaataaccatcgtcaaccttcttcgtggtgggtacgtgatgctacttatatccgtttgaagagtattgaaatcggttataccttgcctcgttcgacactgaactttattggtatcagctctgcccgtgtatatgcttccggacaaaacctctggacatggactccgtttatgaaagaattgattgacccggaagctaaatccgctaatggtaaatactatatgcagcaggctgtatatgcttttggtttgaatattactttttaattagttaaccatcataacaagatagaatatgagaatacataatataataaaaacagtttgcctggcaggctcattagccttgttgtctgcctgtgaagactggcttgaaatagagccgaaagaccgttttggagatacaacggtttggggatcggaagaaaatgccgatatgtttctgaatgatatctataatcagttgccgcatctgaacaatgaaacacagaatctggatcaatattcggataattcatacgtaggtgcggaatggatgaatgcccgtacaacgatttataccggagcattatctcctaccagttggatacccggcccttgggatatgtggaaatggggacgtcagaacaatgacgacgccaaaggacagtatgaacgtatccgctcctgtaatctgttcattacaaaagtaacagaatccgatttctcggcagattataagaaagaacgtcttgcagaagcgcgtttcttgcgtgcctggttctatcattatctctggatggcgtacggtggtgtgcctatcattacggaagtgctggataataacgtgagtacggatatcttttatccgcgtgagactgcacagaaaacatttgagtttatcgacaaagagttggacgagattaaagatgatcttcctccacgtcgtagcggttccgatctgggacgtgcttccaaaggagcaattctgacgctgaaaggatgggtggaactgttccatgccagtgaattgcgtaatccgggcaaagacaagaaacgctgggaagcagctgcggctaccttgaaagatgtaattgacttgcaggtctatcgtctgcaaccgactattcttgacctttggacagaagctaccaacaataacgatgaagtgatcttcgacttccagatgtctaagcagaatggcgggcgtcgtgaaggcctgttcggtccggtgtttgtaaaaggagtacagtccagttggggaaatatgcagcctacacaggaactggttgacgactattgcatggcaaacggattgcctatcactgaccctgcatccggttacaataagaataatccttataaaaatcgtgagaaacgcttctaccagagcatcctgtatgacggatccatgtggcagggggaagagattatcactcgtgtaggcgtaggtagtcccaatgagattgatacttcttcggatagtgacgttacgaatacgggatactatactcgtaagacgattgacgaatccgtgaatggagcggacaatctgcaaatgagcaacggaatggcaaattatattttcttccgttatgcagatgtgttgctgatgtatgcagaagcttctttggaagccggagataaaccgactgccatcgaatatttggatatggtgagaacacgtggagataatatgccttctatcaacgatacttatccgcagggaatcacagagaatcagttgcgggaaatcattcggagagatcgtcgcatagaactggcgtttgaagataagcgttggtgggacattcttcgctggaagatttgtgatggtgaaaacggagtgatgaataaaccgattggcggtatgaaaatagaagataccaatggagatggtgtgtgggaatacaattatcatgaagttggtaaacgtaccttcctgccacgtatgtattatcagcccattccgcagtatgtgatagacaagaatccggtgatccgcgagcaaaatggtggtgaagacggatgggtaaacgggcagaatcccggatattaataaagaatgtaaaccttgaaagattattcgtatgaaactaaatagatttgtcatggcggcaagtgcggtactttgttcgtttgccttgctgagtggatgtagtgatgatgatgtttgtaaagtatatattccggaagccaaaactttgcagattaaaaacttcgatttgggtgaagaactgagagaagtatttcatgtggctgtgactgccagtgactatgtgacccgttccggtaaggaagtgggaggagatgtaaaggtacagttgactgtggatgaggcgaaggtgcaggagtataattctttgtgtgggacagactatcctttgcttccttccgattgctatacgctgacaacagaaactgtgattccggccggggagagttcttctgccgatctggtgcttacggtaaatgcacagggaaaaatccagccgtttgattcttatttgttgccggtcactatcacttcggtagaaggtgcgcaggcggatcatattcagcagacagtatattaccttttgagtggtgcggaggatgtatgggcgatgccattggccgaccgcagtgcatggcaggtagtagaagtttcttcggaagagacgagcggcgaagggtcggataacggtcacgctatccacgcttttgacggactgaaaggaactttctggcatacacaatggaaaggcaacgagcctcagccaccacatcatatcgtagtagatatggggcaggaagtgaaaatgctgggctttcagtatgtatccagagatcatggtgaagcatggccgcaggagatgacgatggaaaccagtctggatggctcgaagtgggagtcggcaggaacttacagcgaccttcctgcgggggcaaaagaggaattccgttcctattttccgggatttaagcaggcacgttatttccgtctgacaataactgccgtgtatagtggcaaatgggcaacagcggtagcagagattaatgcgatttctattattaaataacagaaaaaacgattaccatgaaaaaatacatttatatacttttgacgttctgtctgttaatctcctgtatggaagatccgacggcaggtgtggtcgttcctaaatatactccgtctaccgagaatccgggaggtccgggtgaagaaccgggtgatgggctgatagatccggcagaaccgctggacaggggatttatgcatctgaaaggtcgtgaactgaaatccctgaattctatttccatcacaggactgaatgatggcgagaaagtaattctttccactttggcagggcttgcggcaagagtgacgggcgatcaggtttatatcaatgaaggaggtccttcttccgtatggttgaagcagatgtagaataagtacggaattccggtaaatacttataatgctttggctccgttggtacagcattatgtagaaaccggagtgatcaaggggtatattgtctatacgccttattcggaaggacaatctcattcgatcaatgtagctacttctttatgtgggttgcttcgggggattgcggtaccggaatctcttgtcgataaggtaaaggcaatgggagtgacaaccgaacttatggacgtaaggtcttatgatgagaagtggttgtacgagaattataaagaccagttggacaagagtcttgcagccgatatgaaaccggaaatcttccatcacctgcgcgattatatcacaatgaccaatgcttttgctttttatgactacaatgcgcgcagggattggtcatggcgtacttctatactgaaagatctggataaaggagcttattgtttcggttattatgatctggatgaatggggcatggtgaataatgcttctcaattgggtgtttctatgttgccgaccgatcaggcggctaatctggccacgttgagtagtatatatgatacaacaggactgaaacagcgtccggcaactaaagaagtggttaccgaagagaatgtgcactatgtgacattcctcgtcagtgacggtgataatattgcgtttaacctttgggggcaacaaggatacatggatcatgacctgcacggtcaattcccactcggatataccatttcaccttctctgtacgatttggctccggctgctttacgctggtactatgagaatagcaaagaaggcgattactttgtagcgggtccgagtggcagcagctatatattcccgagtaagatgtcggatgccgacctggacgattatctggctaagttgaatgagtatgtcgataagtcaggcttgaatatctgtaatattctggatcagaagattatggataatccgaaagtttacaataagtatctggctcagcctaatatcgatgcgattttctacacaggatatggagaaaaaggggatggaagaatcaaattttcggataatggcaagccggtgattgagcagagaagcgtattatgggaaggcatcgacggtggctcgaacagaggtgaagaatcgactgtcatttctcagatcaatagccgctctgccaatccgcatagtgccgacggatatacttttgtatttgtacattgctggacaaagaaccagcaaagtatcaaaaccgtcattgatggattgaatgacaatgtgcgtgttgttccggtcgatcaattcgtgcagctggtgaaacaaaatctgggtcctaaataaacgaatatactcgtaagttatttattatgaacataaaagtattagttgcatcggcagttgctacattcagttctctgccggtcatagctcaacaagcaccagctccttgcgggttggttccgagtgcccgtcaacttgaatggtacaatcgggagatgattgctttctttcattttggaatcaatacatttgaagaatatgtgaatgaaggtgacgggaaggcaagtacggcaattttcaatcccacagccctggattgcaggcagtggatgcagacattaaaagcagcggggattcccgctgctattctgactgccaagcatgccgacggattttgcttgtggcctagcaagtacacagattatagtgtgaagaatgcagcgtggaagaacggtaaaggagatgtagtccgcgagtttgtcgatgcttgtgaagagtatggattgaaggcaggaatctatctgggacctcatgaccgtcacgaacacctttcacctttatatacgaccgaacgctacaaggaatattatgcccaccagcttggcgaactgatgagtgattacggtaagatatgggaaacatggtgggacggcgcgggagccgacgaattgacaacgcctgtttatcgtcattggtataagattgtccgtgaaaaacagccggattgcgttatcttcggtacaaagaattcttatccgtttgctgatgtccgctggatggggaatgaagcgggagaagcgggtgatccttgttgggcgacgactgactcagtagctattcgtgatgaagctcagtattacaaaggtttgaatgagggtatgctggatggtgatgcgtatattccggcagaaacagatgtttcaatacgtcccagctggttctatcatgccgaagaggatagccgtgtgaagagtgtccgtgaactttgggatatctactgtacctccgtggggcgtaatagtgtattgcttctgaatttcccgcccgacagacgtggtttgattcattcgaccgattcgctgcacgccgccttgttaaaacaggggattgatgagactttcagtacgaatctgttgagaggagccaaagtgaaagcgaccaatgtacggggtgcaaagtatagtccggaaaaaatgctggacaatgagaaaaacacttattttgccggaaaagacggagaggtaaaagcggatataatttttaccttgcccaaaactattgagtttgattgtctgatgatcgaagaagttatcgaattgggacatcggacgacgaagtggagtgtggagtacactgttgatggcaaaaactggatcaccattccggaggcgacggacaagcaggccattggtcataaatggattgtacgtctggcaccggtgaaagcaaagcaggtacgtttgcgtattcaggacggtaaggcttgtccggctatccatacttttggcgtatataaacagtcaccggttttcaaattataatataaattagactactaaatgatgcaacgattaaaaatcttgggaagtgcattgattgcactgtcgttttccgcctctgcggttgtggcgcagcagtttgatccgaagcaaggatatgaaatccatacggtcaacggattagtgctggacaatcaggagagtctggatacgaatacgaaaatatttatcagtaagcaggaggcagacaaagaatcgcaggtctggaacctgattccatgcgaacaagagggatgctatacgataaccagtcccttgactcaaatgaatgtagataatagtggtaaaggaaaagtagaatgttccgtgattcaatggtcggcagaccctaaaaatccgaatcagcaatggaaaataacggctttgccgaatgggaattacgtattaaccaatgtcgggactggctataacttaggatttcctgatgccggactggtcggagagcctgtctttcagttagaaccggaagcttcgaaaagtaaccagcagtggcagatacggaaatcgaacctgaaagtagtggcggaagccttgaaaacaacgagtcataatgactgggaaaatgaacgtatctatgcaatcaataaagaagaaggcagggctacatttattcctttcgccaattcggaagagatgaaggcggatcccgcttatacccgtccttgggagcgtacccgctcttcccgttatctgctgttgaatggaaactggaagtttaactgggtgaaacaaccttcggaacgtccggtggatttctataaaacgagttatgatgtctctggctggaaagagattcctgttccctccaactgggagatgcacggatatggtacacctatttataccaatattacttatcccatccgtaacaatcctccttttatacaggggcagcgtggatatactgtagagaaagagccgaatgcggtaggatcttatcgccgtgaatttgctcttcctgccgactggaaagacaaagaagtctttatccatttcgatggaatttatagtgcagcttatgtatggatcaacggtaagaaagtcggttattcgcaagggtccagtaatgatgcagaatttcgtatcactccttacgtcaaagcgggtaataatacggttgccgtggaagtttaccgctggtgtgacggcagtttccttgaagatcaggatatgttccgtttaagtggtattcatcgggatgtttatttggtagccagtccgaaagttcgtctacgtgacattcacctgacttctcagatcagcgaccgtctggataaagcggaactgaaagtgaaaacggatgtgcataattacggaaagaaagtacaggaagctaccgtacgtgtctctttgctgaatacggaaggaaagcctgtgagttcgtttatcatacctaccggtaagataactggtggacaggaaaacgtctgtgaaggtacgactacgattcgtgaccctcggttatggagtgctgagactccttctctgtataccgtccaactggaactgcttgatgccgcaggcaatgtgcttgaagcgacgagccagcaatatggcttccgtaagatagagatccggaataataaggtgtatatcaacaatgcattgatcctttttaaaggagccaatcggcatgacatacatccgcagtttggaaaagctgttccggtggaaagcatgatagaggacattcttctctttaagcgtttcaatctcaacacgattcgtaccagtcattatccgaacgatccgaagatgtatgcgctgtatgattattatggcttgtacgtcatggatgaggccgatattgagtgtcacggcaatatgtcgctgtcaaaccgtgaaagttgggaaggagcttacgtcgaccgaatggtgcgtatggtggaacgggataagaatcatccttcggtcattttctggtcaatgggcaatgagtccggtggtggtcgtaactttgaggctacctatcaggcagccaaagcgatagacgaccgttatatccattatgaaggaatgaacgatgtggccgatatggattcccgtatgtatccttcgattgaaagtatgatcgaacaggacgagcaaccccgtaacaagccttatttcctttgtgaatatgctcatgcgatgggcaacgccatcggtaatttggaagaatactgggattatattgagcatcattcgaaacgtatgatcggaggatgtatctgggattgggtggatcagggcattaatatgcccggacagcctgccgatcattattattttggaggcagcttcggtgatcgccctaacgacaatgatttctgttgtaacgggattgtgacggctgatcgtcaagttactcctaagttgtgggaagtgaagaaagtctaccaatatatcacattggaaccgaatgctgaaaacagtatcggcgttcgtaaccgctatgctttcctgaatctgcatgattttaatctgcgctatgtgattttgaaagatggtgtgccgatagcggaagaagagttcagcctacccgatggtaagcctggagagcatcgtgcggtgcagataccttattcccgctatttaacttcagaaggtgaatattatttgaaccttgaaataaaactaaagaaggattgcgtatgggcaaaagccggacatatcgtagctacggaacaacttttgcttcaaaaatccccgaataccgggctacagccggtagcagtttccgcctcatctaaagaatctctgtttaaggtggtggaagaggagaagcgttatttgttcttccgccgtcccggtgtagaaatcacctttgataagaaagaaggcaagttgaccggtatccgttataatggcgataatatgcttcatctgcgtgaaggatggtcgctgaatacgttccgttttatcaataacgatgtgcgtaaatggcaggatacccaaacggaggtaatcagtttcgactggaaatgctcggaagataatcagtcggcaattgtaacgattcagttgcaggaaaccgtcggagatgtgaaagtgccttatacattgatttaccgtttgtatggtaatggtgaaatagatgtggatgcttcttttacaacgaatgatgactttaatcttccccgtctgtcgttacaggccttctttaatccttcgttggagcagttggaatggtatggtcgcggtccgatagaaaattatcgggatcggaagaatgcggcttatgtcggcaaataccagtctgctgtcaatgatatgaaagagagttatgcccgttctcagacgatgggtgggcgttgtgatacccgctggctgactttgaccaataaagcaggtaaaggaatcaagattactgctgccgatacatttgatttcagtgctttgcactatacggataaggacttgtttgaaatcaagtacggtcatgccttgcctgatatttatcgtgcggaggtggtgctgaatctggattgcatacagcgtggtctgggtaatgccagttgcggaccgggtccccgtcccgcttatgaaattcagaagaatacagtttataaatatgctttccgcatgtctcctttttcaaaataaggaaagattgacaggataacaaggtcttaatagtttgtagaaagagtgagcagccaaatcttataaaagatggcaactgcttactctttttttgtatttaaggatagattctgtgttctttttgtacttttgtaacatggactctaaattatataccacgatgaaacaaagaattatattattcggattaatacttgtaggaacagtaacttttgcacagtctcccgtagaaaaaggcttgaacacgatcaaccgttcttctgccgaagcaacaatcggtttccttgcaagtaatgaattacagggacgtgaagccgggttccacggttcgtatgtctcctctgagtatatagcatctatcttacaatggatgggaatccaacctctgaacgaaagctacttccagtcttttgatgcttaccgcaaagagcgtcagaagaaaggacgtctggaagttcatccggactctgtagcgaagctgaaacaggaagttcatcaaaaactatctatgaggaacgtactggctatgattcccggtaagaatacgaaggaatatgtcatcgtaggcgctcactttgaccatttggggatagacccggcacttgacggagatcagatttataacggcgcggatgacaatgcttccggtgtctcggctgtattgcagattgcccgggcatttcttgcaagcggacaacaaccggagcgaaatgtaatctttgccttttgggacggagaagaaaagggattgctcggttctaaatattttgtacagacttgcccttttgtttcgcagatcaagggatatctcaactttgatatgataggtcgcaacaataagccggaacaaccgaaacatgtcgtctatttctatacagctgctcacccctcttttggagactggctgaaaaaggatattaagaagtatggtttacagttggaaccggactatcgtgcctgggacaatccggtagggggcagtgacaatggaacgtttgccaaagcaggtattcctattatctggtatcatacggacggacatcccgattatcaccagccatccgatcatgctgaccggttaaactgggataagatagtggaaatcaccaaggcttcttttcttaatatgtggaagatggccaatgaagcttcatggtaactcagcctcactgaaaggctgttttacatcttgcaataaagggcggaaggaatcagtttgaataaccatgccacatatttccatcttttggagataaaggcgacttttttcctgtctgatatagcctttttgatttgttttacggctttatcgacaggagtaacccaaaacaatccttctcctttcgccatcgctgtatctacaaatcccggacggatgtcagtggtgtagacagcaaagggtagctttgccgccttttgccgcagtccctccatgtaattgatttgataggcttttgaagcattataagctggtgctacaccgctgccgcgtgttccgcctactgaggaaatgttaatcagatgcccgcctttctgctgttcaaagtaccggaacccccagccggcgatattggtaaatcccactacgttggtcaataaggtcggttcttcgagctgataggagagctgtggattcagttcccccgttccggcacagataatcagcatatccatgccttccatttcttgtacaagcgtttccagcgatgaaagggtcgtttctgtgtgagtgatgtcacatacctgatagaatagtttatctttatcttgtgcgcaaatctcttttaatagattctcacggcgaccggtgatgccgataaggcagtcttcacgggcatactgttctgccaatccacgaccgatgccggaggttgcgcctacaattattattttcttcatgaatttaaatagactatgtttgcctgcaaaggtaggagaggagtctgaataaaatcttgattgaaatcaagaatttacttccgaactacttttctccggatgcggctcaacgtttccggacgaataagtagataggaggcgagttcttttaaagtaatcagtttcagcaggtcgggacagcggttgataatatccagataacgttcttccggtgtcagactgtacatggagatcatccggtcatagatttcccacagaagagtttctgcaatccggcgtcccagtttttggtggtcgttgttaatgtcgtagaaatctgccagttgggaatggttgatcacatacaccgtacagtcgcataacgcttgaatatctacatttgattggtcctgcaactggaaagccggataattcccgacaaaagaatggtcgaatgtatatccgacaatgctgctttcgcccagactgttgacgcaacaatagcggaaagagccggaaacaacaaaccccatgatcttacaggcttctccttgccgtacaaagtactctccttttttataaaaagtctctttcccctgctgtaatgtaaaatctacaataggggaatagttgatatgggaagtatatttattgaaatcttccacagtgcggctatgattaaccttcgtttatcacttggaatccggcaagttttaaatcctcccaataaccgggatacgatttggaaacaacttgcgggtcagcaatcagtaagttgggacaagaggttactgccggtgcgaatgccatcgccatccggtggtcttcgtaggtcgcaatcacaggaaccgcttccggttcgcaacgttcgccgttccacatcaatacgctgtcattttcttcttcgatgaggtatcccagctttttaagttcggttctcaatgcggcgatgcggtctgtttcctttattttcagactttgcaagcctgtgaagcggaaagggatatttaataaagcgcaagttacaacgaacgtctgtgccaagtccggaatgtcaacgaagtcttcttccagtcgttccggtgccttgcctgtttttttgatctttatgccttggggagtgaactccgtcgtgatccccagacgggagaaaacttccgctccccgactgtctccctgataactgttgcggaataatcccaacagttcaatctctgcttccggagacaaagcggcaatctgataccagtaagaagcagcgctccagtcgctttctacggtgaaggggacactctgatacggttgcggagctacggagatgctgctgggtgaagtccatgccgcttttgctccgaagtcctgcattaattgcagtgtcagattgatataaggacgggaaatgatttctcctgtcaagtgcagtgtcagtccgtctttgagcacaggacctatcatcagcagggcggatatatactgtgaactgacgtttcccttcagcgtgatttcatttcctttcagctctgcgcccttgatgcgaagaggcggatatccttcgttatgggtgtaatctatttcagctcccaactcgcgaagagcgttgaccagaatctgtatcgggcgttgctgcatacgggcggtgcctgtgataatccgttctcccgaagtggcactcagataagcggtcaggaaacgcatggcggttccggctgccatgatgtctatagtctctttaccttcggtcagggcttttatcatgacttgggtatcatcgcaatcggacaggttttccggcggataaatgcctttacccagcgcattgatgatgagtgcacggttgctgatacttttggaagctggcaactggattgttgcctttaccatggaaggggaaataagtttatagagcatcattctaagtatattctttgttatggagtacaaaagtagagatttattcggagacttccaacagcttctgactcttatcgagagagttgaaataatatctgtaccgatgtttctgctgatatttggtttatcaattaacagtttataatgaatagtttgcgaagaaactttatatttgtggcaaataaaataactaatttatgaatataccgaatatccgtttgctgaatcagcagttattaaatccactttttcgtgaacctaaagagttggtatcctggatgggagccatgcaggcacagaactattccatggtgaagtgggcagtagggatgcgtctgaaatcggctacaattcaggcagtagagaaggcgttgcatgaaggagaaattctgaggactcatgtgatgcgtcctacgtggcatctggtggcggcagaggatatccgctggatgctgaaactttccgcgcaacgtattatttcggcaaatgattcttttgcgaaaggatatgatctggacatcccaaatgaactctatacgaaagcgcatgacctgttggagaagattctttgtggaaagaaaagcatgacaaaacaagagattgccgaacactttaaccgttcggggattgtggcggacaatcaccgtatgactcgctttatggcacgtgcggagcaggaaggcatcatttgtagtggcgaggacagaggaagcaaatgcacgtacgcacttttggaagaacgggttccgccgatgcccgaactgacgaaagacgagtctttggcgcgcttggcacggagttatttccgtagccattctccggcagttttgcaggatttcatttggtggtcggggctgccggtttcggatgcaaaacaggctgtttatctgattgcttcggaactgacaaccgaacaatggaaagaacagacatggtatattcatgacacctgccggactcgtggcaaactgtcgggacatatacatcttttgccctcctatgatgaatatctgctgggatataaagaccggacggatgttctgccccttgaacattatcccaaagcgtttactaacaacggactgttctttccgattgtccttcataacggtcaggtcataggaaactgggataaatcggaaaagaagaaaagtgtcgacctgaaatattcatggttcagacaggtggccgatatggatgaagaaacgttggaacgggagcggcagaagtttgcccgttttttgggaaaatagcttgatgggacactggtaaagtgggagtgtttagtggaaagttccgttaggatatggaaccgggttctgttactatccattagccgacgatagttactcattaatcacataaatagcgattttttttcgttgcacctaggtgagacgaaagagtcacctaggtgcttcagttgtttaaccaaggtgagacaattgttgtacctaggtgcaacggaagaaaatagccaagaatgacgatcattttggctgatggaatacttgtttagccatatatctccctaaagggtaattgttctgagtgaatcgctattgattggctcaacaagactgtccgcgaagtgtgattgtgtaccatcattttgctccgccatctaagggagcttgttggaagaactgtctttctttatttgccggcttgttttttagcccattccagtctccgctgatctgccaaaggagttaccttaaattcttcgaatgtggccgtgaatccctttccgtccgggcaggctcccattaatccgaccataaccggacaattatcctgcaaccagcaagtacgcatcatcgtatattccttatcatcgcgggagaagaaaatctccactgcatccagtcggcggaccgctttaatccataaagaacgaggagcatccggcagttgcactacactccagtcgctggtgcagtgggtgactacggcacttacattctgtttgccgtctacgtactctacccctgcctttatccagttctcgtggtcgatgcgtaacatcaatcccatttggtcgaaagtagtcacataattgccggttattttcactttcacctcaaactctccgccataagtagcatagtagaaaggtccgtcgtctaccgtaaatccgtagtgggaaatccgccagaaatcggttttcgccggaacgtccatcactaaagccttgccttcttttatttcccattgctgaggctcattcagccagttcattttgttcagactttgtgccatagaagaagttgctgccgccaataacgcgattgacatgattttgatttttaaatgtttcatgttcgtttcttatttatttatctttgtggtgcaaagataggtcatgcctgtccttgcgacaatactgaataataaccattttatacgatggacgtactacaaaaagaaattgatgaagtctatgctacgcatccgacagcgcacgaagcactggataatggaatagtggaacaacaccagcagtttgtccgctcattgacggaagttaatggagggtgtgctgtcatttccgatctttcgaaccggaaaagttacgttactgtccatccgtgggcgaatttcctgggacttactcccgaagaggcggctttaagcgtaattgattcgatggacgaagattgtatctaccggcgcattcatccggaagatttggtagaaaagcgtttgatggaatacaagtttttccagaagactttttccatgtctcccggcgaacggctgaaatatcggggcagatgcagactgcgtatgatgaatgaaaaaggcgtttatcaatacattgacaaccttgtgcaaatcatgcagaacacccctgccggcaatgtctggctgatcttctgcctttattccttatctgccgaccaacggccggaacaaggcatttatgctacgataacccagatggaacgtggggaagtagaaacattatccctttcggaagagcaccgcaatatcctttcagaacgcgaaaaggaaatactgcgctgcatacggaaagggctgtcgagtaaagaaattgccgcgactctttatatcagtgtgaatacagtcaaccgccaccgacagaatattttggaaaaactttctgtcggcaactcgatagaagcctgtcgggcagcggagctgatgaaattgctgtaatattccttgaatttatccgggatttatccagatagagtatttatccaagtaaagatagcagatcatcgagtcttttcacctgtttcaagcgttcgtgtgcgaacgtttccgttacttcatgcttccacatgacttcaaaaggaatatgtactccgtatccacctaaagataagaccggctgaatatccgatttaaaagaattgccgaccatcaaaagttcggaaggagctatttgcagaatactcaatagccggagatattctttttccgtcttgtcggacatcacctcgatatggtcaaagtaaggagataatcccgaacgttccagcttattctcctggtccagcaaatctccctttgtagctactaccaacttgtattttcccgtttctttcagcgttttcagcgtttccttgactcccggaagtaattcgataggcattttcaacaaggatttccctaaatcgacaatttgccgaataatgtcggctgcaatctttccgttgctgatctgtaatgctgtttcgaccattgaaatggtaaacgccttggcgccatatcccaaaatttgcagattattcatttctgtttggaataaggcggctgagatttctttggaggtgccatacggtttcagcaaatccgtatactgtttttccacttcctgaaaaaaaggttcgttactccacagcgtgtcgtctgcatcaaaagctatgactttaataagttctttcatcggtcttgtcgttaatgggggacgagaatcgttccgttatattttgcggcaaagttactgtattttcatataaatccctatctttgttacccgttttaagtttgaattttaataggagatacaataatgaaaataggagataaggtgcgtttcctcagtgaggtaggcggtggaatcgtaacaggattcaaaggaaaagactttgtactggtggaagatgcggatggttttgatatcccgatgccgatacgtgaatgtgtcgtgattgaggcggatgattacaatataaaacgcaagcctgccgcgacagctccgaagcaggaggaacccgcgaagccggccaaaccggaaatgccggttatacagcgccagccggaagtgcgtggcggtgatacgttgaatgtgtttttggcttatgtgcccgaagatgccaaagcgatgatgactactcctttcgaggcatatttggtgaatgacagcaattactatctgtattatacttatctgagtgcggaaggaaaggcttggaacaaccgttcacatggactggtagagccgaataccaaactgttactggaagaattcaccaaggatgtattgaatgaaatggaacgggtagctgtccagctgatcgctttcaaggatggaaagcctgctgccatcaaacctgctgtcagcgtagagctgaggattgatacggtgaaattctataaactgcatacattcagtgcttccgatttcttcgaagaacctgctctgatttatgatattgtgaaagatgacgtgcctgccaagcaggtatatgtgtcggcggaagagattcagtcagctttgttgcagaaaaagtttgtggataaacccaagtcgcagcctattatgaagcccaaccacggtcagagcggaaaaaatgggattattgaagtagaccttcatattgattctctgcttgatgatacgcacggaatgagtaacagcgaaattctgaactaccaactggacaaattccgtgaagtaatagaggcgaataaagagaagcgtgagcagaaagttgtgtttattcacggaaaaggagacggagtgcttcggaaagccattattgatgaattgaaacggaaacacagcaattaccgttatcaggatgcctcttttcaggaatatggtttcggggctaccatggtgactatcaaatgattccggtgtacttgtaaatgatgctgaaaatgtatttgccggaataaagtccggcaggtgggatgagataaaaagaagggtggagaacttgaccggtctccaccctttctcttgctatatgattcaattttacttacttaggtcgatgcctttattcagtaaagtaaggttcatcaaagcggcatatttagcatattgttcagcgctgagcgtctttctcataagtttcaagttgccgtatacagcgttgcgcaattttgcttctttatctttcttggctgtagtggctcttgacatctgttctgagaaataatcgcagatgtttgctacttcttcgctctgaacagagtttaactgcaaatatttacctaatttatttacgttgatgttaccttcccattttgcagttgtaggttggtttcctgctgcaaaagtcgaagcagcgaggcagagtgctgccactaatgttaatcctaaacgtttcataatacctactttttaattgttatacctaaaaactattcctaaaaaacaaatctaatacctattgaaaactgatctaatcgcttagttttttctttttacctatgcaaatatagcgatatgttttatagcataaaaataaagaaaaggaaaagattttgtttcggttgatttcttgatgtaaatcaagaaatcaactgctttttgatacaaaaagaccttattctgaaacatttttgcaatacgtgtgcggaaacgaaaatgtaatataactgaattttaaggaatattgctgttaaaatgatattgagcaaaggaaggtgacgagaaatggaacactgaaatcaactacaaaaccatgaaagatagaaatgattacgaattcttttccggaacatcgggtgatgatgggaagagtagtgtccattgtggtagctcctcctacagaaataggggccagcttgccgaaatacttcacgagtaacggggctcccagcaatgctatgatttcacgcatgatgttggataacaatgcgattgttcccaattccggacctttatattcggtgatgaatatactcgaaagggaatagtagccgaatccggctcccactgccatacagtctgaagaggttctttggctcatgaaaatgcctgctacggcgcatcctgccaatgtccccagtatcgtcatgacggggagaaacatcaggcggggattcagagaacggaaacttttcagtgtgttgggatcattaccgatactgatacctacgcagaacatcagtccgcaaagggcgtaatagcttagtttgctatccgtaaaatcgtaaggaatcagatgataaaacccgcaaagggtaccgagaatgaaaaatgagacgatgatcagacttcctttcatgcttccgtctccttccctctattccttatatataataggtaccagagtccccatgcgcaaagtatactgccggtcactgccgccagtgtgataatgagtgcttcgagtcccaatgtatgcagtcctttgatgatagcctcgtttcctcctacatcaatcccgaggaggaagagcaggacccatatcagcagggtgattattttatgtatccaagatagtcttttattacgtagcaggaagcccagaagcattcctgtcagcataattccgatgatgataaacatagtaagtgcctgtttttggctacaaagataattgaaatagatcgttgttcctaattaaagtcggtggagacgttcgtaaaatgaaaggaaactttcagcgaatttggaataaaaacagaaattgaagcctggtttttagtaagatgtctaatttaaattcatatatttatagccgtcaaattaatgtaagatatatgcggagactaaaactatattatttgtttttccacagtacgttgaaaataaacgttccgctgtctatattaggtgcacttattgtatcaaaagctgactggagcttgttttgggaagcttttccttatctattgggtggctggggaattgttgccagtttgctttataaggagtttcttgaaaaggaagcctactttttctattataattccggaattctgaaacggaatttgattgtctttgtgtttgctgtatattggtctgtactttggattgtaaaattatgcatcacttgcttgaaatagatagtattattaagaatttcggtaccaggcaactgctgactgatgtttacctgaaaataaatacaggtgatgttattggattgttcggcaggaacggtacgggaaaatccgtgttgatgcaaataatcttcggaacaatgaaagcagaccggaaatttatccggttggatgaatgtaaggtcctttcggctccttaccaacatgcaaggacaatagccttcctgccgcaacaaggctacttgcccaagcatgaaaagataaagaaattggtagactgttacctggatgctaatgtcgttccctatttttatgaggatgatgaagttgcccagtcgtgtatggaacggcgtgtctcccaactttccggaggtgaacggagatatttggaagctaagttgcttttgctgggcaatgctaaatttgtcctgttggatgagcctttcgattatttatcctttcatttggtagataaactgatcgggttaataaaaaaacattcggaagagaaagggatagtgattgctgatcataattacgaaaaagtcttagaggttgtcaatcgacttgtcttgattcgggagggagtattgatggaactaactgataagcggggattggtggagcaggggtatcttttagatgaaagttacttatgaatcctgctcctatatttatttttgcaagtcatttcgggttattttccctgattcgaaccgtttgagatacttccgtgctgatacctatcattcccgtacctccatgtacattactgggatatctgagaggttcgttaattgtttcgtcataaacgtcggaatcgactagattgagtgctttcagatagtaatattctgtttccgtgatactcaacaaacggatgatgacatccattccttcataatatccgttgtaattgttgttgtatgggatggcgggatcgttgtagaccgtcattgtataggaggtatctctaaatcgcgaatcatcaaagacaccataaatgtttttagctgtgtcgaacagtccgttgtcttcgtcatctcctgtggaaggttgaccgtctgtcagtactatgtcttcgcgtccgataaatgaataactgatatgctttgtccagtgaagataatcttctcctccttcttcgtggttgtatccccatagtcgcatttgtttatctactacaatgcggtagaagtttgcctcgttcgggcggtctttaaaagttattttgtagcgcatgtagtcttgagtatgtccgttttgtgttagcgggacggtgagcgtgtcgatgttttctattttatcaaggcgttgcggaacggtgatttctgcccaggcatgatatttgccgtcatcggtcatggcatcaatacgcactacttctcccgaagcaaatttgcctgtgatgttgaaccggcattgcttgtcatactcagtttccatcgggagtgggcgcaaggtctctcttaactctccgttgacgtgaacctctacagtggcattttcaatgtggttggcatagtcttttcccgtcaggttaaggaataagacatttgtcatactgtcagcgttaatgaatgcattcattaccaatttaggaggattatcctttatattaaaagggagttcattttcacaagatactgtcaccagtattataactagcaggataagcggatgatatatataagttttcatgttaacttagaatttgtaagtgtaagtaaaagatggaatgcaggggagcagggtatattttttgatcacactttttccatcgtcattatgagagcgaaatacccatgccggattcatggagttgtatgcattataaagactgatgttccagatacgcattccgtgcttggtctttttattgaaattaatccctatgttcaaccggtggctcgcaggtagccggtaattattgcgatgttctatgtaattggcctctccaacattaggggaattgttataaataggattgtagtagttatcgaatcccagaataaagccattgtttgctccattgccaggacggatgatggttgttttttcttcgggaatagtactggttcctcctgtgtaaaacacccacgaggcaccgatgtcaatgcgttcgctgaatttatggttgagagtcagattaatattatggcgccgatcatatttgtatggaaatcgctctccattgttgatagcacctttagcaaatttgcggtcgcttttggataaggtataagacaaccagcctgttgtcttcccgagcgttttttgagccataaattcaattcccatcgaacgtcctttccccatttcaactttgctttcccatccggtggaagaaccgaaaaaactgactccgtctttatattccagcacattgtacatgtctttgtaatagccttctactgagaactcccaacctttgatacctgtataatatcctcccaatgaatactggtgagatcgcatcggtttgattttttttgtgacaggcacccataaatcagtaggcatagcgatgggcatggaagaaagcagatgtacatattggctcatctttgtataagatgccttgaggattacgtctttacttagttgataacgtgttgagacacgcggctgcaaagagaaataactttgtttttgtacttgaaacagagaaaagtgtaatccaagattaagccgtagacgagtactgatttttaggttatcttctgcataagctgatacttcatgtgcataaatccggctgttgttcatactgtggtaagtagtgtcgcgaaatgcctcagagtctaccttgtctgatattttggaggtcatcacttccggacgaaaacggtgatagatatatcctgctccaaatttaatatggtgcataggagatgggttgtaatcaaaatctatctgataattccagtcattgatacctgaacgatagtctgaagagtatcggttgatgaaggttgtgttattggtgagtgaatattgattattcgaatatgcacttacattgaataggtagttgttgtaggaaactgtcgtgttgctaaacaggcgattattgaaaatgtagttccatctggcggaaatgattgtgtttccccagttcattttacttccgtccttgaaatcgctattatcatcatattgggtagcgaagtgatctttcccgttataagcactcagatataaacggctccggtcggaaaacttgtgattgatctttgcattgatatcataaaagtaatagttgtatttctcatcatcgggcatgaatggcttggctattaaatcaatatacgaacgtctggcggatatgttgaatgatgttttgtctttcacaatcggtccttccaaatttattttgctggttagcaagccgatactgagtgtcccatgatattttttcatatccccgtcattggtgcgtacgtcaatgacggaagaaaggcgtccgccgaagcgtgcaggaaaggaacttttaaataaagtgacctttttgatagcttcaggagtaaagacggaaaagaagccgaacatatggtctacgttatataccggagttccgtcaagtaagatcagattttggtcgggactgccaccacgtatatataatccagccgatccgtctactcctgcctgtactccgggcattaactgaatggctttcattacatctgattctcctaatatacttggagtattcttgatttgcaccattggaatctcgacagctcccatctgtgtggcaactgtccctgcttctgctttatctgaaacgaccactacttcttctaattgtgcgtttcctttcatacgaatattcagcagagtatcttgagcaagggtgaaatgatgtgtttctgtggtatatcccaaataagagaaacgtaattccgtttctccttcgggcagagtgatactataaaagccgtaaggattggtagtagtgccttgatattgatgactctcaatgatattagtaccaatcaacgtctcggacgacgtcccgtcggtaacatatccgctgatagtaaacttgcggcttaccggcttttgcacccttttcttttgcaggagaatgtatctctcagagaacttgtaactgatcggctcattcttgaatacgagatccagtatctcatgcaaaggcatatctttcactttcagattgattttatgactgatgctgatttcttcactgtagataaaagaatatcctgtagagttttcgattaacttgacgaactccttcaatgtagcatttcgcaatgtgattgtgagtcgggcatttgcattctgtgcgtatgcctgtgcggtgataaggatcaccatacctatcagaacgagcgttctgacaggcaggtgtccttggtgaatagttctcatttagtctagtttttagtaatagtaatctgttgagtgtttcgtgaatagttgaaataaccggcattatgcagtacagataaaatcgcatccaagtcttctccattacggaatcgcgctgtgatccgataattttgcaaggttgagtcggcaatgtgaatcgttgttccgaatgagttggaaagttcgcgggcaatctcctgcaacggcagatcatcgaatatgaactccccgtgacgccatgaaatttcatctccggcattctccagtaccttgcgggtaagcttttgttccaccttattatatatagccacctcattcggtttcagcaccatgcgtactgagttgtttttattgctgactgcaaccgaccctgttaataaagtcgtctttacatccggattgtcgggataggcgtccacattgaagtgagtgcccaatacttgaacgtcaattgtttctgtttgcactataaacggatgctttgagtctttacttacttcaaaataggcttctccgctcaactccacttcccggtcatccgatttgaaccgttccggataggaaagggaagaataatggtttagcgtgacggaagtgccgtcgggcagacggacggtacgtgtttctgccaaagtgctaacagtctgtatggttgccggctgcatgtacagataagctgtccataccgatagacacagtaaaactactgctgccgctgccgcaaatgtgcgtgtcagatacaaccggtggttgcggaaattcagctttttctccagctgcggatagctggatgctgctgaaaaacgtcctctcggtgagcgggtggaagcgatgagcttgttcagtatgtcttctaattctctatcggtatatttcatatctttttctatttagctttctttctaattccgtttcagcagaatcgtcagtttgcttacactgccttctttccactgaggagtacaggacaaggtaatgttctgctgttttagtaccatctttttgggatataacttaatggtggtcgttgccgatttctgtcccgccttgatggtgactttggcttctgtcagtttcataatcggtgcctgtcccgccggcaaagcaggagtggcaagtagcactgtcctgtcttctttggatttgtcggtggcaataattttaatctgcaactcactttcggattgattcttgtcacattctactgttcgggtagatttttcaaatcctacgtaatcctttggataattgtcattgtcattgttgcaggaaaataggctcaggcatgttgttaaaaggataaagagtccaacgtttgcgtcattaaactttttcatcattcaatcttttttagtgattaatcggtttatttgctgataaagaccggagattgacagaaactccctacgtcttttgtgcaaataaaagttaatataaaaaagaagtgctgaactcttcgggtgatcttcggttattcgctggacgaaatcatctctttcagtcgggtgacagctttctgtagctgggcatcaactgtctttatgctgatatccaattcttctgctacttgggcataactttgtttttcttcacggatgcggatgaatatttcccggcaacgttccggaagccggtcgagtgctttcacatagattgcaaacagttcttcactgattaatgactcttccggagaataactttgttcctgtggctccggcaaggaatcggaatggatggtggcgtacttcgactctttttccagataattgagagaagcgttcttgaccagaataaagcaatagtcctcgatgtttttcacatcaagaagggtgtcgcgctgcttccaaagtttgaggaagatgtcgagtacgatttcctgcgaccattcttcctgtttcacataatagtaggctatgcggaagagtcggtcgtaagtcatgttatagaagtcgcggaaggctgtttgtgagtccagttccttcatttgccgtaataacttccttacttctgattcggtcatcggctgatcgtttagttttttaattaacccaaagcaagtcgctcataatgctgtcggagatgaaaattccttcccgtgtcaggcgtaaagccccctcgtggatttccagtttcccattttccagatagggggcagacattttccggcaatattcccacagttcattaccgaactcttgttttagtttttctataggtgttccccatacggtgcgtatggtggtaatgataaattcgttgtaacgggtcgtttggtccaggttttctgtctcaaagtcgcgctggtttccttctataccttttatatataggtcgatggaagatacgttccattcgcgtgtcgttccattgaatgaatgtgcggacggtccgcagcccaagtatggtattcccctccagtacgaagtattgtgacgggagtatttgccggggcggcagaaattggatatttcata

SEQ ID NO: 4583 - DNA, 7191 bp, Unknown
  gut microbiota DNA sequence
tgcaaattcttcaaatatttgcaaggattggaaagaaaggcaactaactataaagcaaccacatcaaacctattactttaaacatacacagacattgtacaaattgatttaaatcaaaatcgttcatgacgaactcattctgagagattttgttttacctttgcaccccgtaaaaaatacactaaataaagaaggtaaaaagtaacaggtatcaggttaggtttcgtatgaagaaaagtcttattgcattggcattcggtaccctcggattgggtatcgccgagttcgtgatgatgggtatactgcccgatgtagccagagatttaaagattagcatccctgctgccggacatttcatttccgcctacgcactaggcgtttgtgtcggcgcccctgtattgacattagcacgtaaatatccattaaaacatatattgctggtattagtcacgctgattatggtaggcaatatctgtgcggcattatcacctaactactggatgctgcttatctcccgcttcatctccggactccctcacggagcctatttcggggtcggttctatcgttgcggaaaggcttgccgataaaggcaaaagttcagaggctgtctccatcatgatagccggaatgaccatcgccaacctgttcggcgtaccgctgggaacttctttaagcaccatgctttcgtggcgggctaccttcctgctggtaggactttggggaatcgtcattctgtattacatctggcgttgggttcctcaggtagaagggctgaaagataccggtttcaaaggacagttccgctttctcaaaactccggctccctggctcattctgggtgctacggcattaggtaatggcggtgtattctgctggtatagctatatcaatccaatgctcactcatgtctccggtttctctgccgaaagtatcaccccgctgatgattcttgccggattcggtatggtcatgggaaatctgatcagcgggcggctctccgaccgttacactcccggaaaggtaggaactgccgcacaagcactgatctgcctgatgctattgcttatcttcttcctctctccctacaaatgggcggctgcgctattgatgtgcctctgcaccgcaggactgtttgccgtatccagtccggaacagatattgataatccgtgtagccaaaggaggcgaaatgctcggagctgcctgtgtacaggtagcgttcaatctgggaaatgccatcggagcttatgcaggagggctggcagtcagcagcggctaccgttatcccgccctgacgggtgttccgttcgcactgatcggcttcatcctattcctgatcttttataagaagtatcaagccaaatactaaagtaactcctataagaacgaataacgcaataaacaaagcaaacagggaactgcctttcagtatgaaagcatattgacgtttctgctgacagatacattttcagaagaatgccagccagctctcaaagcaataaaacaatgtatcaatatgcagactatctgcatatcctttcgattatattggaagattatgcaaaagggtcgctacttaacatgcagaacattaatacccaacctgcagaacattaatgtctgacatgtcagctaaccttatccaacgtgttggtcatatatatccaacgtatcagtcagccttatccaacgcatcaagccttcatatttgacaagatggacattactttctaattattagcattgtaaagattcagataccaccctatttatgaacaaaatacagattttcattcgcatattttctcccattcccgccgtcgggcaggaaaacggcattctgaagagactaaaaattcattttgtcaatttgctcaaaacctttttccagcctgtacaattatcagaaaaagacagaaagtgcaccaagtttccctcattagctcaaaaaatgattatctttgcaaactaaaatgagcaggctggcaatcaaaactgtttttatcgggagattagcgccaaatcgctgctcacatgatatgattcattgataataaaagaaataatagattaatatggcattgcaatgtggtattgtcggacttccgaacgtaggtaaatcgacacttttcaactgtttgtcaaacgcaaaagcgcaagcggcaaacttccccttctgtacaatcgaaccgaatgtaggcgtaatcaccgttcccgacgaacgtctgaacgcactggcagaactggtacatccccaacggattgtccccacgactgtagaaatcgtagacatcgccggactggtgaaaggtgcaagcaaaggcgaagggctgggaaacaaattcctcgccaatatccgcgaaacagacgcaatcatccatgtactccgctgcttcgacgatgacaacgtgactcatgtagacggaagcgtaaaccccgtccgagacaaagagatcatcgactacgaacttcagctgaaagacctggaaaccatcgaaagccgcatccagaaagtacagaaacaggctcagaccggtggcgacaaggctgcaaaacaggcttatgacgtactcgttcaatacaaggatgcactggaacaaggcaaatccgcccgcaccgtcactttcgaaacgaaagacgaacaaaagattgctcacgaactcttcctgttgaccagcaaacccgtgatgtacgtctgcaacgtagacgaagcaagtgcggtaaacggcaacaaatacgtagacatggtgcgcgacgccgtgaaagatgaaaatgcacaaatactcattgtcgctgcaaagaccgaagcagacatcgccgaactggaaacatacgaagaccgtcagatgttccttgccgaagtagggctggaagaatcgggcgtcgcacgtcttatcaagtcagcttacaaactgctgaacctcgaaacctacttcacagccggcgtacaagaagtacgtgcatggacttacgagaaaggatggaaagctccgcaatgcgcaggcgtcatccataccgattttgagaaaggatttatccgtgcggaagtaatcaaatacgatgattatatccagtacggctccgaagcggctgtcaaggaagccggaaaactcagtgtggaaggaaaagaatatgtggtgcaggacggcgacatcatgcacttccgcttcaatgtgtgattatcggtaatcactaacgacttattaattatcacataagcatcaatgacatgaaatatctcatagcaggaaccggtggagtaggcggcagtatagcaggctttctgtcgcttgcaggaaaagatgtaacttgtattgcccgtggagctcatttgcagtcaatacaaaccaatggtctgaaattgaaatcggatctgaagggtgaacatacgcttcagattaaggctacgacggccgaagagttcaaaggaaaagcggatgtgatcttcgtctgcgtgaaaggatattccgtcgattcgattaccgaactcatcaaaagggcatcgcatgagaagacagtcgtcatccctatcctgaatgtttacgggacaggaccacgcattcagcgtctcgttccgggtgtaacggtgctcgatggttgcatctacattgtcggctttgtttccggcacgggagagatcacccagatggggaaaatcttccgtctggtgtatggcgcccacaaagggacacaagtgactcccgccatcctggaagctattcagaaagaccttcaggaaagtggaatcaaagctgagatttctccggacatcaatcgggatacattcgtcaaatggtcgttcatctcggcaatggcggtcactggtgcttactatgatgtaccgatgggtgaagttcagaagccagggaaagtacgtgatacgttcatcggcctttctactgagagtgccgcactgggacgtaagttgggagtggaattttccgaagaccccgtcagctacaatttgaaagtcattgataaactcgatcccgacagtaccgcatccatgcaaaaggacttggcacggggacatgaatcggaaatacaaggtttgctgtttgacatgattgcagcagccgaggagcaaggtatcgacataccaacttaccggatggttgccgaaaaattcacaaaacactaattacaaaccgtaaaccgttatccaacatgaatacccttttattatcaatcaactggaatccgaatcccgaactattcaacctgttcggcatttctatccgttactacggattattatgggcagtaggaatcttctttgcttacatcattgtccattaccagtttcgcgacaaaaaaatagacgagaagaaattcgaccccctcttcttttattgtttcttcggtattctgattggagcacgtctggggcactgcctgttctacgatccgggacagtacctgaccagcggaaagggatttgtggaaatgcttctgccgatcaagttcctggcaggcggcggatggaaattcaccggttatgaaggacttgccagtcacggaggtacactcggattgatgattgccctatggttgtattgccgcaagacgaagcttcattatatggatgtggtggacatgattgctgtcgctactccgatcactgcctgtttcatccgtctggcgaatctgatgaactccgaaattatcggtaacccgaccgatgtaccctgggcattcgtattcgaacgggtagacatgctcccccgccatccgggacagctctatgaagcgatagcttatctgatcctgttcttcatcatgatctatctttataagaattacagcaagaaactgcatcgcggattcttcttcggactctgtctggcttatatctttaccttccgtttctttatcgaattcgtgaagcagaaccaggaagcattcgaagacaacatgatgttcaacatgggacaatggctgagcgttcctttcatcatcatcggtttctacttcatgttcttctatgaccggaagaaggtagcaaagaaatgaaacaaatcatagatatagaaaactgggagcggaaggagaatttcaacttcttccgccacttccagaatccccaattatccattacctccgaagtagagtgcggaggagccaggcaacgtgccaaagcggccggacagtctttctttctccattatctttatgctgtgctgcatgcagccaacgaaataccggagtttcgttaccgcatcgatccggacggacgtgtagtgctctatgacaccatagatatgctgtctcccatcaagataaaagagaacggcaagttctttaccacccgtttcccttaccacaacgatttcgacactttctatcaggaagcaaggctaattatcgacgccatccccgaagacggtaatccgtatgcagcagaaaacggagaaatagccgacggagattacggactgattctgttaagtgcgactcccgacctgtattttacttccatcaccggcacacaggagaagagaagcggcaataactacccgttgctgaatgccggaaaagccatcataagggaaggcaaactggtgatgcctatcgcgatgacgattcatcacggatttattgacgggcatcatctttccttgttttataagaaggtagaagagtttctgaaataatagtgctgttcaaatcgtattttctcattccttttatctacctttagcgcgactaaatgataaaaatatgagcacaaaaacactattcaaactactatgggtacctttcgtcacatccgtattcgcaagttgcagtgacaaagaagaattaccttacactcctccgaaggaaacgaatgacagttacataagccctgccgtaccacaaggtaatagctggcctgaagcctccatgtcacttacacagccttttctgggtgccggatatgatattatgggcagctacatagacaataattcggtaaaagaaccagtgctcgatctgagcaagatagataatgaaaagattagcaatctggtaggttcgagcggggtaggagacagcttcattggtcgtgatatgaaagagtttcttcggtcaatcacagaatataagaaatttgtggtgccggcagaaaacaaagatgatttgctgtttaccgctactattaccggtcatacttattttcagaaaccttatgattattcatcccaatacacatttgcatttggtagttcaggagctaacggagtgattcaaagattactcactctgaatgcggattggtccaactggctggccgatgatttccggcaagagctggaagatgcgtcacctgaaacaatcatagaactatttggtactcatatattggtgaacactcatttaggttatataagcaaaaccctctatcgcagcatcgtagcggatgatgaagagaacttattgagaaccgcaaacacagggatgggcgcacatcagagcagcattattaagcatcccaatatttccatcacttatcccgaagaaacagtaaaaaagaactatgggggaacaattgtagtgtcattgcaaggagctgattccaaagtctttaatcagctgacaggcgatccgatggatatcagcccctggatacaatctgccaatgaaaagaatcgcgccttaactactctgaccggtgaagaccttatccccatctacgacgtaatagccgaccccataaagaaacagcaaataaaagaagcggtaatagcccatatcaaaaggcaccaactgtccttacaacaaacggctcccatctttcaggcgagtgacgggtactatcaccgctactatacctcttataaggagttaactgcaaaggcggatatctgtcaaggcgtgataggaagcgtatttatcagacacgaaccgggtacagtaccgctttacctgtcttccgacggaaagaatcaccgtttgacattagaaccggcaccgaacggagacggaacaatcatagggtatgtctatgaaaaggaaagcgatgacttaaactgtatctacgaaatatcggatggaaaaaactttgcctataccacggaagaaaaggatgcttacggagacaaaggcacatggaaaccaaccggtctctctttttatacaaagaaggtataagcataaggccataccattggcacggcaagtaaccctataacttacaacataagaag

SEQ ID NO: 4584 - DNA, 26803 bp, Unknown
  gut microbiota DNA sequence
agttcgggcattgcaccgctctgcgtacaaacataagcggaaacttcgacagccagcttatgagcttcgggaacagacttgccgttcagaatggaagcacagaaagcagcagtaaaggaatcccccgctcctaccgtatcggctaccggaaccttcggcgtttcctgaaaagaaacgactcccggagtaaacacataactaccattgataccgcaagtaagaatcaacattttcagattgtacttggccaatagaatccagcacttatcctgtaagtcgatgcccggataaccgaacatacggctgattgtcaccagttcttcatcgtttatcttcagaatgttgcagcgtttgaaagactcgcgcaatacttctttcgtgtagaagtcctgacggaggttgatgtcgaatatcttcagctgtccgtctatatcgggcattgtatcgaggaatcggttaattgtagcacggctcacttcattgcgttgagccaacgaaccgaaacaaacggcacgcgtattcaaagccagccgcttcagttcgtccgtgaaaggaatgttatcccatgccactccttctttgatttcgtaacagggcaccccttcgtcatccagtgtcacctgcaccgtaccggtagggtaatccacccgctcgatctgagttttgagttgcttttctttgaatactttcatgatttcatctcccagttcgtcattgcccaccgcacttactacacggctgtcgaaaccaaactgtgaaacatgataagcgaaattagccggagcaccgcctatcttctttccttcgggcaatacatcccataatgcttcgcccattcctacaattatattattcatgatctacggatttaattgttttccaaatataaaattattttttgatacggaaggtatagaacagcaagtaaagtacaccgactgtcatcacagcaatcgcaccattctgccccatagaagtatccgaagcaactcccatagccaacgggaaaacggttcctccgaagagtcccataatcatcagaccggaaacttcgtttttctttcccggcagataaagcaatgcctgcgagaaaataacagagaacacattcgaattaccaaaaccgatcagagcgatacaagcgtaaatcaccgtcttatcatggaagatgaacaaccctaccatagcagccagcatcataacaacactgataccgaagaaagatttcggagacatctgacgcaggatgaatgatcccagaaaacagcctgccgtacggaagataaaatagaggctggttgcaaaagcagcatcatccagtgtcatgccgatacgttccatcagaatcttaggcgcagtagtgtttgtaccaacgtcgataccaacgtgacacatgattccgataaaacaaagcaagataaacggtttgccgagcaatgccaggcactgtccgaaagtggaaggtttgccttcttccttctcttcttcaatctgtgtcgcgttgagcagcagaatggcaaggatggctattaccatataaatagggaataatacacgccaccccagatcgaaagaaggaatcgcctgcgttgctccccacatggcaatgtacggtgcaaggaaagaagcgatcgctttcacaaattgtccgaaggtaaggctgcttgccagacggtcaccacgaacaatattggaaagaagcgggttcagtgaagtctgcatcagtgcgtttccaatacctaacagggaaaaagaaatcagcatcagtgcgtaactgtccccgaagacaggcaacagtaaagaagcaaaagtcacgatcaaactgagcaacacggttttcttctgaccgatacggctcatcagcatacctgtcggtacggagaaaatcagaaaccagaagaacaccaatgaagggaagatgtttgcttgtgagtctgtcagacccaggtctgcttttacataattggaggcaatacccaccagatcaacgaatcccatggcgaagaaacaaagcatcaccgggactagcttggagagagaagcgtttttagtattttccattgttttatctattataatttcgtatattagcacagtaattaatttcctttcccattgatcctttttcttttagcctcctattttctttgcttatcacggctgtgaacagaccgtatcacaagggtgataaggccttatcacagtaatgaacagatcgtatcacgtaggtgaaacgctatctatctcctatacataaggagaacataaaggcatgttaacgcacggataaaggtatgttagcgtgtatcaaaaagagcgcagggagaagaaagtcgttttttatttctttagtttgtaaaccacgaatgaatctactttataggcgccgcctttgctgtagaagctgatatgattgtaaggttccgaagggaatacctgattggtcatagcgaagcgtccaccgtcaccgaaagcctctacacttgatctgtctacaaacaggcggagtttcatttcatccttatcccctatcgcagtccaagtcagcatcgggaagttttcgttgaaacttacctcgccactcttgcgacggtccatcgagaatttcttctctttcatgtcatactgcatatctacttcttcacccttgtcattgtagagacggaaaccgatgacttctgcctgctgattcttgagggataattctatttcgtaagcaccttcattgttcggaatcaaatctttcacgatacgtgttccgttaaccttgaacgagcgctttttggaaacgtcacgcagtttcaacaattcgggagaaggagcggattgaagataaatcccaccgtcgatggcaaagagactcaaatcacgaggaacggagttcggactacgatattgagaagttggcacgtcatttgcatattgccagttgctcatccatgcaatggcgatacggcggttgtcgggggcatcgctccaagtaactgtagcataatggtcttttccccagtccatccatttcgtgacattcggctgattgtcacaactaaatttcttgccgtcgaagctaccgataaagtattgagtagcggagtcaccgaaaggaccgtcaccgaggctacaaagcaatacccatttcttttcgttggtgccctctaccggaagttcgaataagtcggggcattcccatacgttgccatgagcaccgtatccttcgccgaagctactttcaaatgcccagtctttcagattgggagaagagaaaatctgcatttcctgtcccactgcgagcaccatgatccagcgtttggttgcttcgtaccaaaagactttcggatcgcggaagtcgcgtgcttcggatacaagtacagggttgttttcgtatttggtgaaagtgcgtccgttgtcagtgctgtaagcgatgctttgtacctgacggtcgctgttttgtgtataaatggcgatgattgcgcctgctccgaagccggctgtattgttatgatctaccacggcagagccgctgaagatagtaccgagcgcatccggtgctatcgcaacggggcggtgttcccagtttatgaggtctttgctgatagcgtgtccccagttcatgtttccccatttggagccataagggttgtactggtaaaaaagatggtattcaccgtctttatagaccattccgttcgggtcgttcatccatccgtaaaggggagagaagtgataggtcggacgaaacttttcacggttggtcgtatcgaaggtgtcggagagtttcatttccttgcagcaagcggtattatccggcgaaagattgacacggatcggatcgttggagttcatcttgaacttgaaagagaccgttttgccggaaaagtcggaaaggtctaccggaacaaagtaatctactttatgtatggcgagacgcacgtcgaagtttttcacctctttattattaacgatcatgctgatacgtacatcgggagacgcatcctctacgggcagaagcaggtagttctgggaagtattgacacgtacaaggcaatgaccttctcccagattcttaatcagcaaaggagaatccgccgctcgggttgaaacagaaatagtcatgagaataaaacaaatcagaaaggtctgaagttgtttgacaggcaaaaatacattcatgttctatggtattaaggttgttatacttttgatagttgttacagtgcaaagataggcgcttccaaggttagcgcctatcacttttgtttcaaacgctgtaaaagatgttacttgccggtgtagttttcatcaataagtgcttacctgaacgtctgatacagttatttcacctttataacagcagagtgaccacgggttcttctgcatttggtagatacggttggtgaaagataactgatcgttgatataagtcacgcagacggactggtcactgtaaatcgtcacacgatattcattatctgccggaatattgaatttattatcgaataagtatttggcatcgtcaccgtctttctcaaaattcgctttgccttcatcggcattgacatggatactataccaggaagcggaatccgttccacgtacaaaagagattccgaaacggtccgtattcgaagcggtctttacggtgaaagaaatcttgttatgtactttcagacggttgaagatgacggaggcaccttcgcccaaagtataggttttaccgctttcgatcacgttaccatcttttgccattactttcacttcttgtgcggaagtgtatttacggtcgattgcatcgggtactccgagggttaaagtaccgtcttcgtgttgaatcagacgttgtgctaccagattgcctgcccattcgggttctacatcaccaacatttccattatcatttccggcacgtgtgggacaccaaccccaaatgtagcggtttgttccgtcggaagcggtctttccggcatagaatgcgcggctgtccagcattccttcacgattgtccggccatattccggcatcattggcggtagttgctttcaaatcttccagcgttctgcctttgaaatattgtactttacgcatgaaggaagcctgttccgaataaatcagataccaccagtcccccatcttgaatacatccggacattcgtagaaacgatcccacatcatggtcataaaggttccggcagattcccactctttcaggtcggcagaggtaaattcggcgatatgcccttttccgttcttgcgggtagcgatcagcatgtgatacacaccgtcttcggtctggaacaggaacgggtcacggaagtcattcttgtcataaccatacgtatctcctttcaggtagaaggtacggttcttggtccatgtcttgaaatcgggagaagtagctaccatcactacctgagcattctggtcggaagaaggcttgaacttattaccggtgtagaaggtataatacagtttgtcggcagggttatagatcgttcctcctgtgccgatggcagcatcctgttcgtcacgccctccgcaggaaatcagttcgccgagagattcgtaagtagcaccgtctttggtagccaccccgaaaatgggatggtacgtagcttcggggttcggacggtaatcttgcaggtacatcactttaaagtccttggcaaccggatcatagaatggcatcgggtcacctacaaagccgacctgtggcttatagtacatcgagaagccatgctcatcactcgattggaagtatgtggctgtaccgtcccagtctttctgagtcaagatggggtcagtctcgtcactgcaagcagtcatcgaagctatcagtgcggtaaatgctataggtaagatcatatttttcatcattgttgcttattctttttatttacacaagtagttgattgcattgagagtcatttgctctacgttgtagtgatagtagtcggcagaagcgtctactcccttgccgtaccaatcatagcagccggaaccgatacagagcgtacgtccgctattggaacgcggttcaaattcggcaatgactaccgccccgtcgcctccatgtgccaaatcgattcctcctgtcaggttacgccatgcgttcaggtcgtcataacctccccagtctgtcccgatatgccactgcgctgtgctattggtgatcgcatagccggcatcacaggtatagactgtcgacttgtctccatctttccatcttaaatcctggaataacggatgtgattcgctaccagtaatcaggaagctccacggagcagaggtgatttcgggcgagtcttcgtttcctccccagctattgttcggtacacgctcgtctttggcgatgccgagattggcgatatagaaagtagcgtaacgggtcagcagcagattaccaccattctgatagtagactttaaacttctccgctgccgctttcgcgtcatccggcaaaggaggattgtcaccattgtctgcgtggaaatgccaccagatagcggtatatttacctaaatccacttttccgtccactacatccttgaatgagatatattcggacatcgatacattatccatcatccattgggcagcggctttctcttcgggactcgtcagaaggctgacggaagaagccgtaccgacaaaggcagtcggaatcacatttccctgagtaaccgttaccacataaggagttactgccgaacggtaagttgccgtgtaagtgacggggttcgtaaagtcctgaatacttccggatgccggagtcacggtagctccgtccgttacggtaaacgtacctttcaactgagtgatatccactgtcagcggaacgactacagaaatggttttcgataactggtctacctttcctacataagtatcattcaatttgaaggtcagtatcttcgcctcatctctcttcacagtaatcgtgtagctcatttgtacatcgccattcttcaccgtcaaagatacgggaagagaaaagtcgattgtctcaccgatagcgatgctagccttggctccttcggaaagattcatttctgtgaccaccatgcgggtaatatcgtaatcgtagggcactcctactacgattgccttattctgatagtcgacagttcctgcgtattcatccagccggatagagttcacccaaacatctccgtccagacgaaggccggatttgaagtcatcactacatcctgtgactgtaaggcatgccacagtcaccaacaggatagtataaagttgttttatgattgatttcattgtattctttgttttaagatggttagttaccaaccgaaattctgtgtataatttccattacttgcgctgatctgttcgaatggaacaggaagatattcgttcttattttccgtaaagcccgcattcttgtagatagagcaacgggatgcttccgtcacgtaataagcattgatgacatctttggcttctccccatcttacaaggtcaaagaaacgtgagctttccataccgaactctacgcggcgttcccatttcagcattttcatgacttcgtcctgagcgtaagctttcaggtcgtaaggagtcactttgaagttcactccgtagtcttctttataattgaagatcagcatggtgcttccggcagcacggctgcgtacctcattgattaatgagatggcatcggtgatacgtccgtcgttcaactgaatcagtgcttcggcacgcatcagcaatacatctgcataacggatcacaatgtgattcagagaactggcccaataagaacctttcttcagacagtcacaatcgggatctacattctctttgagagaaacataatatccataaagtcccttgctgcggctccagtcatcattcttctggatgatgtaaccttcgttgtacttataaggaaagcccggcatacccaccgtatggaacagacggggatcgacattgtctgtagccacttcgtaattctcattgtcgtaggtactgaacaaaggctttccctgcgaatcggttttgaaagcattcaccagattctggctcggcttgtggaagtcgcagcagcccagtatctgcggagtggtcagtcccattccccaattcaggttaccgttgtaagtaccgtcgttgatagaatactgaatggcccatacagactctgcaccgttttcatattgcggcaggaagttcatgctatagtccgtttccagtccgtaaccgcctttagccatgatcaggggatcggtgtatttcacgacctgtttcaggtcttcttcgttgattccggtaagggcattatcggctccgtcctggcggtaagctttatacaggtaagtttttgcaaggtaagcagcagcggctgcctgtgcagggcgtcctttttctatttgtacttccggcaggttgtcgtaggcaaactggaagtcgtctgctatcttttgccattgctcgtcattggtataagtggtattcgacagttcattgtaagcatccggttccatgttttcatcgtttacaataacgatcttcttgaacagctgtttcaacatgaagtgagcgtgtccgcgcaggaatctcatttcggcaatgcgctggttcttcaacggataggtcttttcatccatttggtcgagtgattgcagagctgtgttggcacgggtgatgcattgatacagtcttttccatatatcattgatattccagtcggtggtattgatacctttggatatttccagtgcgttgaacacaccgccgtcttctgttcccgaaccgcctttatagcaatcgtcggaacgtacatcataattccagagagagaaggaagagttgatatcatcacctgtcgcccagatggcgtaggcagaaatcaccagattatctacatattcgggagaagcgatctgatcaccggtcacaataccctgaggaacctgacggtccaaaaaatcgtcacaactggttgtcagcaaggtaattccgattgttgctatatatattatctttttcatgatcattcgttttattgatgaagtaagttaaaatccgatgttaagtccgaacgtgatattcacagggatcggataagaaaagttcgggttctccggatcttctccggtaaaattcttgctcttgatggtcagcagattctgtgcactgcaatagaaacgcaagcggtccattctcatttttttggagataacagcgggaacggtgtatcctaactggatattacgcagtttcaggaaagaaccgttttctacgaagtaagtagagacacgctgttcattgttcgtatcactgcgggtcaatgccggaatatcagagtttgggttcgtaggtgaccaggcattaagcaaacgggttcccttattcaggaaaccgacattggaagcactccaaaaatcgcttttcttcttcacgtcactgattatatccactccctgaacgccttgccagaacattgtcagatcgaagttcttatattccagataaatattcaatccgtagctgaaagagggagtaggatcataaatccagttctgatctctttcgtcaatcacaccgttatggtcaatatcacggtaacggatacggccgacagcagcgccttcttgagtagcatggttgtctacttcatcctgcgacttaaaaatgccatcagcaatgtaaccgacttgtgcgccgtaagtatgtccgactacactcttcacaccattaccaccaaacttgccgttggcagctaccgtttccggcaattcaagaatttcattccgataagtggatatgtttccgttcaggtcgtaagtcagtccaaaggcagtcttgttacgataacccagattaaattcaaaaccctggtttttcattgcacccgaatttatccaacggctgccgccttctcccagcactcctactcctgccatttcagtcaggatatctgttgttttcttgtagtagtattccagtgaaccgtacagtgattgcttgaacaggctgaagtcgataccgacattggtctgtgtcgttgtttcccatttgatattgtcgttaccgatctggttgcgtttgaaaccggaaggaagtacaccgccaccgttagaacctgtgatatcgtatgccgtaccgtagctctgtccgccgaaagaatcggttgtaccatagttaggtgcatagatagtataacgggcaaggttggagatttcctgattaccggtctgtccccacgaagcacgcaatttcagatcatcaagccaggtcagttctttcatgaagttctcctgtgtgatgcgccatcccaaagatacggaagggaaagtggcataacggtggtttttaccgaaccgggaagaaccgtcccgacggagagttaacgaaagcagatatctatcggcataagaatagttcattttgccgaagaaagagacgagtgaataaccttcaccggcaccgtatgcctgtgccgtgccactacctgcatcgggccacatatagtcgggggtaaggatagagaagtcttctttgtatccggagaaatggctgtcgtcttcacggttcaactccatacctaccattacatctccacgatgtttgcctacttccagttggtaggtagcaatggcgttccacatccatttcgtccagtgttcctgcttggcttccactgcgctcttgccattattggtctgcgttccttcctgataaggataagtgaagtaacgtgcctgcttgttggcatagtccagaccgaaagtggaacgtagattgaatcccttgaaaggagtcagattgacataggcatcaccgaacatacgccagtaagtgtatcggttgtctttattgtattcaagtacggcacgagggttacgacggtcgggccatccgcctaccggtccgccccatgaaccatccgaagcatatacgggaatagcggaaggaatgtccagtgcggtttcaataattccacccggagcctgcacttccgacgtgcgatttaatgtaaaatgctgaccgatggtcaggatatcatcaatcaacttataatcgctgttcatacgagccgagaaacggtcgaagtccgtgtctttgataacacccagattcttgtaatatcccagagaaaagaaagaagaacctttctccgaaccgttgctgacggaaagattgtattgctgaataacaccagtacgagtgatctcgtcaaaccagtctgtgtccgccacaggcattgtattctttgaatccaggtatttggaaagagtcattccgtataataccggattgccgtcggcattatatccccaattgtaagcatatcccaaagcattaccgttcggattttcaccgtcgttcacgtaggcttgccacatagctcgtccgtattgctcagtgttcagtacgttcattttactctgatacatggaggcggaaacagaagcgtcgaaattgattttgatctgtcctttctttccttgtttggtagtaatgatgatcacgccgttcgctgcacgcgaaccgtagatagaagcggatgcggcatctttcaaaacctgaatggattcaatatcattaccattcagttcgtgcataccggctttggtaggaacaccgtcgattatataaagcgggtcgttattgttcagcgtaccgataccgcggatacgtacggtagccgatccactcggattaccatcagcggtgatgttcattccggggacacgtccctgaagggctttcaccggattgttttcaccttgcttctggatttcgtctacttttactacagaaacagcacctgtcaggtcggctttacgctgtgtagtataacctgttacgacaacttcatctaccatctgggtatcttcttccagtagtacattaacgatagcagccgcttttacggtcaccggtttataaccaatatacgtaatctttaaagtagagttgaccggaactgaaagagtgaaattaccatcgaagtctgtaattgttccgttggttgtagctgtagtttcaacgacagaagcaccgataatcggttgcccatccgttttagaagtaacgtttcccttcaccgttatgttttgcccccacagggccgacatgaaagcaaacaggaaacaaacgctgcaaagaagttttttgttcttcatgataccaggcattagtttaatgttattaatttaaaagtacgaattttctcttttcgatgatgcaaattacggttgatttaagtcaaccgactgaaaaaaatgtttcaaatgctgtaagatatgttgcatagaacgctattttatagggttttataagaataattctccatcataagaaagtcgggattatattctctctcaatcatagaaaatactacctttgtatagtaatttaagtccttgtaaaaagggatattattcatataacaagcatataatcactcaaagtaaccaacagaaaactgaatgatatgaaaacaatctccaacgaacaacttactattcaggtatctccgcatggagccgaactttgcagtatcttcgccaatgggaaagagtatctgtggcaagccgaccctgctttttggaaacgccactctcctgtacttttcccgattgtaggaagtgtgtgggaaaaccagtatcgtaatgaaggtatcgcttatacattgagtcaacacggctttgcccgcgatatggaatttactcttgtttcagagaaagaagacgaagtacgataccgccttgtcagtaatgaagagacattatggaaatttcctttcccgttttgtctggaaataggttatcgtattcagggtaagcagatcgaggttatatgggaagttaagaataccggagaaaaagaaatgtattttcaaatcggtgcgcatcctgcattctattggccggattttaatgcagatacacagaatcgtggtttcttcggttttgacaaggaagaaggattgaagtatatcctcatttcagaaaaaggatgtgcagatccttccactgaatattctctggaacttacagacgggttattgccattggatacacatactttcgataaagatgctttgataatagagaatgagcaaatccataaagtgaccctttataccaaggaaaagaaagcttatttaagcctgcactttcatgctcccgtagtcggtctatggtctccgcctgcaaagaatgccccttttgtctgcatcgaaccgtggtacggtcgctgcgaccgcgcacattacacaggcgaatacaaagacaaaggctggatgcaacacctgcaaccgaaagaaactttcaaaggagggtatacgattgagatcaatgaataagtaatgacaacctattctgcgaatagattaaacacagaacagctgccgaacctcacggacggcagctgtcaaacacctaatctacaaaacctaacttaaaaactaactcataaatctaatctatgaaatacagatgatacaagtgataaacacttgattatattcttgataaatacctactgaaaaacaaatctatccttttataaacctaacctatgcacactgaatgaatcgactgcgaatgtaccgcccttactgtaaaaacacatacgattgtacggctctgtagggaaaatcagattagtcatcgctatcttcccaccatccagaaatatttctaccgaacacttatcaacaaagacatccagtttgtattcatcttcctttttgataggtgcccatgtagccaatgcgaaatcatctatataattgatagaaatcgtcttccgtcgatcgtgcgcctcgatctcgtgcggagagctgtttttcccgaaatctacgatgccgcttttcgtacggtccatcaccagtttcttttccggaagattaaggtaaatatccaccttctctcccttgtcattgaaaagactgaatcccataatttccgcctttccagttttgatgttcagagaaagctcataagctcctttattatcagtcaataaagattcgatgtgataatccttgtctaccgtgaaagacggaatatccttgctttcttttcgtaagttcttagtttccgctaccggtgcggcggaaagataaatatcattatcctgtgtatagagtcccaattcacggggcagcgcattggcactacggaactgccgggtcggaacgatattgcaatactgccagttgctcatccaaggcactgccaccacacggtctcccgtatttgagaaacagacagtagcatagtgatctttcccccagtccagccatttcgtgacattcggctgattgtcacaaataaattttgtgccgtcaaagtcaccgataaaatattcagtagcgctccctccgaagtaacatcccggatttacattgacaatcaatgcccatttcttatggttgatatcgccatctacaggcagttccaccatatccggacattcaaactgacagggttgcacaccgtatccttcgccaaagctactcaggtagttccagtctttcagattttgggagtcatagaaacgcatttccttatcggcagagacaatcatcacccatttactctccggtgcataccagaagactttcgggtcacggaaatctttcagaccatcggaaggacgcaggacaggattcttttcgtatttagtaaatgtccgtccgttgtctttgctataagccagacactgaatctgtccgttcttatcgctggcagaagtatagtaagcgaggatggaacctgccccgtagcccgccacatcctcctgatcgacaatagaactgccggaaaagatatgccctaatgtatcacgggcaatggcaggcgccagatgttcccaatgcatcaggtccttgctgactgaatgtccccaatgcatatttccccatttggagccataagggttatgctgataatacaaatgatactctccatctttatataccaatccgtttgcatcattcatccagccataaaggggagtatgatggtagacaggacggaatttatccgtattggcagtatcaaacgtatcggataatctgatttcttcccagcagagggcgtctttcgatttcctttgaatgcgcaaagtggctgcctttgtatcagccggcaaggcaaagggaacaaaataatcgacctttgtctgtgccagacggatatccatatcggtatccgttgcattccccgtatcgagccgcacctgactttcatcggcttcttcctcgatggggagtaatatataatgggtaggatgaatgatgtggacgattgtcaggctatcacctttctgttcaagggtgaatgtgcttttggttgactggcaataggtcagtccaaaggaaacagccagtgcgagtgcggcacctttacattgttttatccaagaagttgttttcatggtaacaggatattcagagttatacgagtgttagtcaaaaatagacgaaggcaaagataggggctatcttcaccttcgtctataaactttgtttcaaagagtaacacttttgatacatcattgaaaaaagggagctacaggcatatagaaaagcagaagtaacaggcgaaaagagaaatggggcacgtcaatgccggagtcgaaccggatagtcttgctgattttacaactccactattcctcccctaaaatgagacgaagtaactcttctctacgacacttgtttctttcgtaaaccggaatcctgagaactccggttatactactatcttttttatctcctgcaacgcatcatttcccttgtcgattgcagacaaaatatcaaatatcttatccgaccatcccgctattaaaaatacatcgtcacgagtgatacccagcggagtgttgccatatccgcttaagtcaaacagatacaacttagctaccggacaaattttcttgtacttcctccacaaatccgttatctgcaagtcactatggctattccacaactgacagtcagtgaacatcattatcttatccatctgcgcctttcggtctattaggtctttgataaccaaatacccgtttgtagagtatcccacttcaccttcccttttatagaaagcatcgacattggacaagatacccgtatcgggcagattgataatcttccatctatcgccaaagatacccgtcatcacctgtttgcaacgtgacttcaacaacattcccagcagcaaaccgatgtcatagtacaatactttactctttgccgaaaccggacactgcatggaaccggatacgtcacaggctatcagcacacgggtagattcatcaaatccggtaatattgcgggcagacacctgcacggcacgttccaaagccgtcatcaacatcgtagcatagagcgaaggagtcttcgacaactcacggtaagcagccaaaaagcggaaaggcaactgcctggagttttcaaccgccttttcggaagacagcctcttccctactgtcagaatatggtctgcagaaacttccgcttccagtatattcctcagattgcgcagcaaagccatgtatcctagtttaccactgtctatcaattcttcccatttggcacggaaagcttttcgccgttcttcttccgtagcaaaggtacactgacctaaagctgacaattctgtctcccaagtatagggaaccggaagattatcattgactattccattgaaaatttcctgttgccgttcatctttcgctttcgggtgcacaagaaacaaggcatctttcagacaaacttctgccgaacggttatatttggcaaactggtacgcatcgaatgtattgaatgcatcctgtagccctgcctgcaactgtttggaaagacggttcagtttctttgtccccgtccgccggtttgcctgctgataacaggccagcagttcggtgatttcatcggcacgccgaacggtacgggcagttacccgcttcaccagattgtcgccctgatggatacgcgccagttctaccgccatcaccaaagggatggaacgcaggttcatcgtttctcttgcgtacgccgccagttgcgccacaaacaaaggatcacattttccgatcagcgtacggaccctttctattctctcttccgcctgctcatagaaactgttgttcaatgaagtagttaccacggatgtgtacaattcccattcgggtgtcagccggtaagccggtgccgattctttgttcagcactttattcattcctttatttatccagttaaacttcatcatttatactctttatttgttttcttttgcaaagatacgggggtgggtacgcagcctttttgcgtacctcaaattatttttctacttttggagaaaatctttatacttccgcctatgccggtcaatagaaatgccttgattcgttataaaacgattgataactgtctgcgtaatccttatcgtcgctggacactggaagacttggtagatgcctgctcggatgccctttacgaatatgaaggaatcgacaagggaatcagcaaacgtgccgtacaaatggatatacagatgatgcgcagcgagaagctgggttataacgcaccgattgtggtatacgaaaacaagtattacaagtacgaagacccggaatacagcatcacacaaactccgctgaacgaacaggacctgaaaacgatgtcggaagccgtggaagttctgcggcagttcaagggtttctcctacttcacggagatgagtgagattgtgaaccggctggaagatcacgtagcctccgcccgaatgaagacgactccggtcatcgacttcgaaaagaacgaatctctgaaagggctggattatctggattccatttaccatgccatcgtcaacgaacatcccctgcaacttaaataccgttcgttcaaggcccgttcggcaaacagcttcatcttctatccttatctattaaaggaatatcgcaaccgttggttcgtatttggagtcagaaaaagcggacggatattgcagaatctggctctggacagaatccattcattagaggtgttatcgcgggaaccctttataaagaatacattcttcgacccgaacacattctttgacgacttggtaggggtgaccaaaaactccggaagcaaagccgagaaggtcggttttaaagtagccgccaacgaagccccctacatcctgaccaaaccgatacaccacagccaacgaaccatagaaacattggaagacggaagtgtgattcttgaaatagaagtagtcatcaaccatgaactggaacgggtattcttcggatatgccaacggaatacaagttctttatccgcagacactggtggagctaatagaaaagaaattaaggagggcggtagaacaatacgaaaagcccaaatgagttacattcggataaaaagcaagtaaccggaccattttcaccttttccggagagaaaaagacattttatgatacaattaattccattttaatgaagaattaatttgctttatcctctctttttaatggttcgacctttactttgcccttgataataccggaaaactcattaaattatgaatatgaagagaagtttaattttactatgcggtctgctgaccggctttaccttgcaatctacaaaggtaaacgcgcagacacaaacagtggctaatgaccagaaactggtctatccctacccctttgcccccagcgaaggtctggtgaaccaaacagaaaaagaacatcgacaagagatttgcatcaacggttattgggatttccagcctgtccgcttgccgaaagaatacgttcagggaaaaggtatcgctcccgaacttccattgccggaaaacgacagcgaatggagcaaaactcgtatcaaaatcccttcaccgtggaatatcaatgcttttgcttaccgtgacctggaaggtcccgaccaccgcaactatccttcataccctaaagaatgggaacaagtgaaaatggcatggatgaagaagaatgtcaccatccctgccgactggtcagggcagcaaatcaaactttactttgaggccgtagccggatattccgaagtctatataaataaagaaaaggtaggcgagaacttcgatttgttcttaccgttcagctttgacatcaccgataaagtgactgccggcgaaaacatagagatactggtaggcgtacgaagccagtcgttattcgaaaacaatgcgaccatcgggcgccgcattgttccgggcggctcaatgtgggggtatcagatcaacggtatctggcaggatgtatacctgttggccttgccaaaaatccatctggaagacgtatacgtaaaaccgctggtatcaaagaatacactggaaatagaagtaactcttcagaacctgacagagaagaagactgacatacaactgcaaggcaatatccgcgaatgggtgaactgcgcaggaacggacgtcaactccgctcccgttccgaactggacgcttggtaatgaagcattgaaagtcgctcctacgaaagtgtccctgccagccaaggcttcacagaaagtgaccttacaagtacctgtcggcaaggatatattaaaatactggactccggggcatcccaacctatatgccctgttactttccgtcaataaccagaaacagactgtcgataccaaatacgaacgtttcggctggcgtgaatggacattgcagggtactactcaatatctgaacggcgaaccttacgcattacatggtgactcctggcattttatgggtatcccgcagatgacccgccgttatgcgtgggcctggttcaccgccattaaagggatgaatgccaacgcagtccgtccgcacgcgcaagtctatccccgcttctacctcgacatggccgatgaaatgggtatctgcgtgctgaatgaaacagccaactgggccagcgacggtggtccgaaactggactccgacctcttttgggaagcatccaaagaacacctgaaacgttttgtcctgcgcgacagaaatcacgcgtccgttttcggctggagtatcagcaacgaaaacaaacccgttatcctgcacgtttacaatcgccccgaactgatgccggtacaaaagaaggcatgggaagaatggcgtgacattgtacatcagtacgaccctacccgcccgtggatttcagcagacggagaagatgacggtgacggtatattgcccgtaaccgtaggacactacggagacatcaactccatgaaacgctggattgaaatcggaaaaccttggggaatcggcgaacacagtatggcttattacggcaccccggaacaggttgccaaatataacggagaacgtgcttacgaatcacaggaaggccgtatggaaggattggctaacgaatgttacaacctcatcgtcaaccaaagacagatgggagcctcttacagcacagtcttcaatatggcatggtatgccttgaaaccgcttccactcggcaagaaagacaaaagcaaagctcccaccgttgaggctgacggagtcttcttcggtgattacaaagaaggagttccgggcgtacagcccgaacgtgtaggcccttattgcacgacgttcaaccccgggtatgacccgaccttgccgctctatcaggaatggccgatgtacagtgccttacgcgcagccaatgctccgggcaaaccggcctggtctccttatgctgtaatcgacaaacaacagtacgaccatcgcaaagcaacaactccttccaaaaagtataaggaagtcatctttatcggtagtcagaacagtaaattaaagcagctgatggatgcgcaaggagtcatattctccaagaaggcaaacactccttccctgttgctctatatcgtagacggtagccaaaagttggatgcttctaccaaggatgagatacaaaagcaaatcgccaaaggagcggatgtatggatatggggactcacaccggaaacggtagccgcatacaatgaaattcttccgcttccggtgtccttggataatctgcagcgttcttctttcctgcccgtacaaaagtcatggatgcacggactcaataattccgacttctacttctgtgaacttcagaagaccaacgcttccagctactcgctgaaaggagctttcgtagaagaaggcgacgtcttgctgaacgcctgtaagaccgactggagaaagtggaacaaacgtccggaagagatcaagactgccggaacgatccgcagtgaatacgaatgtacagccgccactcctgtatttgtaaaatgccagcagaatgcttccactttctatctgaacacattaaccgaatttgccaactcagagaagggattcaacactttgagcgctattctgaagaatgccggaatagccttccaaaagccggaagtcaatatcgacgaggtcttcttcctgcgcgacgaacagatcaacttccccgtagccaccaaagagaaactggtgaaggacagcgacggtgaatggacactggaactttatgtattcagtccacgccctttggacgacctgttgatagaaccgaacatgccgaaactatccctctttgtgaaagcaaagaaacgtgcgctgctcatcaacgacaaaccttatacggctgtatcccacgacggacgcaacgaaatcatctacaaagaattgcccttgctgcaaggatggaataaactggtgatcaaaataggagccggagaccggaactacttcaccggttatttcaaatgcgataacaagaaagatttccttccgttgttgaaagcagctttcgtgaatccggaaaccaaataatagtaaataaatatatgatgaaacttacacacattttagcctcggcggctatcattttaacgctgagcgcatgtaacggtagcctgcaaacagcggatcggacaccggtcgattacgtcaacccgtatatcggcaacatcagccatctgctggttcccacgttccccaccatccagttacccaacagtatgcttcgtgtttacccggaacgtgccgattacacctccgaactgctgaaagggcttccattgattgtcaccaatcaccgggaacgttccgcattcaatttcagtccctatcagggagaaaagctgcgtccggtcataacgtacaactatgacaacgagcacattactccttattctttcgatgtggaattggatgataaccgtatgaaagcggaatatgcgctttcccatcagtcggctatctaccggataacgtacgaggcagacaaaccggcttacctcatcgtgaactcccgaaacggctctatccacgccaacgagaacttcatcagcggccgccagcaactaaatgacaacaccaatgtctatgtatatatagaagcacaggagaagccgataagcgccggcatcctcgaaaacggcactattgaaacaagcaaggataatgccgaaggcgcaaatgcctgcgcggcatggcgctttgccgatggaaccacaacggtcaacctccgctacggtatttctttcatcagcgaggaacaggccgaaaagaacctgcaccgcgaattaaaagactataacatcaaagcactggcagaagcgggacgccaaatttggaacgaaacgttgggacgtatccaagtagaaggaggaacggaagatgacaaaaccgtattctactcttctttctaccgtaccttcgaacgtcccatctgcatgagcgaagacggccgttacttcagcgccttcgacggaaaggtacacgaagacaacggtactcctttctacaccgatgactggatttgggacacttaccgtgccgcacatcctctccgcacactgatcgaccaacaaaaggaagaagacatcatcgcatcctacctgcgcatggcggaacaaatgggcaatatgtggatgcctactttccccgaagtaacaggtgacacacgtcgcatgaactccaatcatgccgttgccacggtagccgacgcactggccaaagggttgaaagtagacatggcaaaagcctacgaggcttgccggaaagggattgaagaaaagacgctcgccccgtggtcgggagcaccagccggctggctggacaatttctaccgtgaaaacggttatatccccgctctccgtgtagatgaaccggaaaacgacccgaacgtacatcctttcgagaagcgccagcctgtcgctgtcactctgggaaccagctacgaccagtggtgtctctcccgtatcgcccaagctctgaacaagaaggaagaagccgaatactatctgaaatgttcgtataactaccggaatctctacaataaagaaaccgctttcttccatccgaaagataaggaaggacaatggattgagccattcgactaccgtttccccggaggcatgggagcccgtgagtattatggagaaaacaacggctgggtttaccgctgggacgtgccacacaatgtagccgacctcatcagccttatgggaggaaacgagcagttcatcgccaaccttgaccgcactttcaccgaaccgctgggacggagcaaatatgcattctacgcaaaactgcccgaccatacgggtaatgtaggccaattctcgatggcgaacgaaccttccctgcacgttccttatctttataactatgccggacagccgtggaaaacacagaagcgcatccgtcaaatgctgaaaacatggttccgcaatgacctgatgggtattccgggagatgaggacggcggaggtatgacttcatttgtggtcttctcctccctgggcttctaccctgtcactccgggattgccggcctacactatcggaagcccgcttttcacagatgccaagattacactcagcaacggagctgtcttcgaaatcgaagctaagaatgcttccgatgacaacaaatacatccagtccgccacgctgaatggcaaagaatggaacaaatcatggttcagccatgatgacctgatgagcggtggcaagctagtattggtaatgggcaacaaacccaacaagacatgggccagcggagcagaggatgttcctccatcattagaaatcaagtagctatattctagcgattaagcgcaagagggttgtcgaagaatcatcgaaataacatctgattcttcgacaatacctcttgtcatattctccggacgacagctatcatatacgagtattccaacactttggttatataaaataagtccccgattcttatgaatatcatattgtttttcgtacttttgccacataggaacagattcaagtagaagtactatgaaatatcaactgcaattattgatttttatcctgctttgcctggcgggcagactggatgcgtctcctttatatgattacggactttatcttaagtctcatgccgtaccggcaccggaaaggtctactttatatttggatgacaaccaacctttctccgtaaaaaacgacttaaccatttcttttcagatatatatacgtgccaatgaagccgactatggctccattcttcatctgaagacagacaaaggccagataatacgcttctcgtttgttgcaggtgagcaaaaccatgctcccgctttaatgctcaatgatgagattatcatcattgacaaacccatagaactggaaaaatggatcaatgtctcgctgaatctgcgtcagaaagacaatgtgatcgaaatagaatacgacaaaaaaaagatgtcgtccaccttccccctgcaagaaacaaacagtgtaacgattacattcggacagatgttaggctatcaggcggaagtagcccctgtcaacttaagggatatcaacatcatacaggacggcaaactgacaagagaatggaaattatggaaacataacgacaacctctgttatgacgaaaaagagggagccgttgcacgtgctgtccagcctctctggctgatagacaaccatatcgaatggaaaacaatcaataagatcactacttccagcagagtaggcatagcattcgacgcccgttgcgccttattctatgtagtcagtcccgaatcggtgaaagtgctggacgaagacggaagactcaaacaagagactgccgtacgcggaggatatcctgccgtagaatatcccaaccacctgctgtatgatacgctaagcaatgcactggtatcttactcactgacagaaaacatcatctcccgcttttcgttcgacgacggaaaatggagcaacgaaatacggaataccaaagaggccaacaactataaccatgccaaagcatttaatcccgccgactcctcattctactttttcggcggatatggcttctataaataccgtaatgacctgttccgcatgaagtccggcagtgaaattatggagcaaattaaatatgatcatcctctttatccccgctattctgctgctatggcagtagtgggcgacgaactatatatctttggaggcaaaggaaacaaatatggtaaacaggaattgactacccattactacctcggcctgtatgccatcaatttaaaaagtaaacagtcccgcaccatctgggagaaaaaagatgataacaaggaaaccatcatggcttcctccatgtacttcgaaccggcagacagttctttctatgccgtatctacggacaacgggggaacactgtggaaaatttccatgaaaagccctgtttatacagaagtttcaaaaccgatcaataaccgactggattatcaggactgcgattttaacctttactattcaccgactcacaggaaactgttccttgtgctggacaagatactgaacaatcgtacacacgatataaagatctattccatcaatatgcctctagtcaacgagatagatatccgtcagtcggtggatgaaatgggctccggcaaatggtggaatctgctgtatgtcatcggtgttctggcaatactagcctgtggtgcctggctgttctatcgttcaaaaagcaaacgtcagccaacccaatcggctgcaacctcaaaagaagttcctcaatcggttgccgctccaaaagccatctctgagaatcaagagaaagttactccgatgatgccggaacaagaaagcgatcccgcaccgaaagagatagtcaactactatgaccgtagccgttcctccatctcattgttagggtgcttcaatgtacgcgataaagagggaaatgatatcaccgccaatttcactccccgcttgaaacacttgcttattttgctgatattatatacagaaaagaatccgaacggtatcctaacctccaaaacaacgggaatcctatggccggataaggaagagacggctgcccgcaacaaccgtaatgtaaacttacgcaagcttcgggtattattggagagtatcggtgatgtagaagtcgtgacggaaaacaacttcatgcacattaaatggggcgagaacgtattctgcgactatcgcgaagtgcttgcacgtatccagcaattcaaggagaaagaaaacgacgaattactcaaccgtatcttggaacttctgttgtatggaccattgttgcccaacaccattctcgattggttggatgacttcaaagaaacatactccagccactccatcgacttgttgaaggatctgtttgaaattgaaaaacaacgtaatcatccggacatgattctccgcctggcagacatcatgttcctgcacgacccgctgaatgaagaagcattggccgccaaatgcgctgtgttctccgcacagggaaagaaagggattgcacgaaatct

SEQ ID NO: 4585 - DNA, 16046 bp, Unknown
  gut microbiota DNA sequence
aaactgaaaccgaccgcagcaaagggtacatatattaagagtatttatctttctagtacaatgagtgcgggtatcaaaatcgacccgaaatcagtggatgaaatctaataaaacagagaaataatgagaaaggaagataaaaattcgattatagagcaaattgctgctacagtaaaggaatatggccacttctatttggtagacgttacagcgatgaacgctactgctacaagtgcattgagaagagattgtttcaagtctgacatcaaattgatggtagttaagaatacattgcttcacaaagctcttgaaagcctggaagaagacttttctcctctttacggttctttgaaaggtacaactgctgttatgttttgcaatactgcaaacgtacctgctaaactgatcaaggacaaagctaaagacggaattcccggactgaaagctgcatatgcagaagaaagcttctacgttggtgcagaccaattggatgctctcgttgctatcaagagtaagaacgaagttatcgccgatatcgttgcattgttgcaatctccggccaagaatgttatttctgctcttcaatcaggtggtaacacccttcacggagttctcaaaactcttggtgagagacccgaataattttcaaaaaacaacaaagtatttaaacaattaaaatcatacaaaaaatggcagatttgaaagcttttgcagaacaattagttaacttgacagtaaaagaagttaatgaacttgcaactatccttaaagaagaatacggtattgaacctgctgctgcagctgttgctgttgctgctggtcctgcagctggtgctgctgctgtagaagaaaaaacttctttcgacgtagtattgaagagcgctggtgcagctaaacttcaggttgttaaggccgttaaggaagcttgtggtcttggcttgaaagaagctaaggacatggtagacggtgctcctagtgtagtaaaagaaggtttggctaaagacgaagcagaatcattgaagaaaacattggaagaagctggagctgaagttgaacttaaataacattagcctggtaatcaggtaattcggttaggaatccttcgcaagaggattcttaacctttttgtgtatatatttcaaattaagttctccaaattcattcacagatgtcttcaaatactgtaaatcaaagagttaattttgcttcgactaagaatccgcttgaatatccggatttcctggaagtacaattgaagtcattccaagactttctacaattagataccccacctgaaaagcgcaagaatgagggtttgtataaagtatttgctgaaaacttccctattgccgatacaagaaacaattttgttcttgagtttttggattattatattgatccgccgcgctataccatcgatgattgtatagagcgtgggctcacatatagtgttcctttgaaagcgaaacttaagctgtactgtaccgaccccgatcacgaggattttgatacagttattcaggacgtattcctcggcccgatcccttacatgactgataaggctactttcgtcattaacggtgccgaacgtgtagttgtgtcacagcttcaccgttctccgggtgtgttcttcggtcagagtgtacatgccaatggtacgaaactttactcggctcgtattattccgtttaaaggttcgtggattgagtttgctaccgacatcaataatgtgatgtacgcatacatcgaccgtaagaagaaattgccggtaactactttgttacgcgcgattggtttcgagaacgataaggatattcttgagattttcaaccttgcagaagatgttaaggtaaacaaaacaaatctgaagagagttctgggtcgtaagttagctgcacgtgttttgaaaacatggattgaagatttcgttgatgaagataccggtgaagtggtttctatcgaacgtaacgaggttattatcgaccgtgaaaccgtactggaggaagtacatattgatgaaattctggaatcgggagttcaaaacatccttttgcataaggacgagccgaatcaatctgatttctctattatatataatactctgcagaaggacccgagtaactcggaaaaagaagctgtgttgtatatctatcgtcaattgcgtaacgccgatccggccgatgatgcaagtgcacgtgaagttatcaacaacttgttcttctcagaaaaacgatatgaccttggtgatgtaggtcgttacagaatcaacaagaaactgaatctgacgactgatatggacgtgcgtgtcctcacgaaggaagatatcattgaaatcatcaaatatctgattgagttgattaattcaaaagcagatgtggatgatattgaccacttgagcaaccgtcgtgtacgtacagtaggtgaacagctttctaaccagtttgctgttggtttggctcgtatgtctcgtacgattcgtgaacgtatgaacgttcgtgacaatgaagtatttactccgattgatttgatcaatgcgaagactatttcttctgtgatcaattctttctttggaacaaatgctttgtcacagttcatggaccagacaaacccgttggctgaaattacgcacaagcgccgtatgtctgccctaggtcctggtggtctttctcgtgaacgtgccggatttgaggttcgtgacgttcactatacacactacggtcgtctttgtccgattgagactcctgaaggtccgaatatcggtttgatttcttccttgtgtgtattcgctaaaattaatgagctgggattcattgaaactccgtaccgtaaggtggaaaacggaaaagtggatctttccgataatggtctggtttatctgactgctgaagaagaagaagaaaagattattgcacagggtaatgctccgttgaatgatgacggtacatttgttcgcaataaagttaaatctcgtcaggacgctgacttcccggttgtagaaccgtctgaagtagatttgatggacgtttctcctcagcagattgcatcgattgctgcttcactgattccgttcctggaacatgatgatgctaaccgtgcattgatgggatcaaacatgatgcgccaggcagttcctttgttgagaagtgaagctccgattgtaggtacaggtatcgaacgacagttagtgagagactctcgcacgcagattactgcagaaggcgatggtgttgttgacttcgttgatgctactacgatccgtattttgtatgaccgtacagaggacgaagaatttgtaagcttcgagcctgctttgaaagaatatagaattccgaagttccgtaagacgaaccagaacatgactattgacttgcgtccgatttgtgacaaaggtcagcgcgtgaagaagggtgacatcctgactgaaggttattctaccgaaaagggtgaattagctttgggtaaaaacctgttggttgcttatatgccatggaagggatataactatgaggatgctatcgtattgaacgaacgcgtggttcgcgaggacttgttgacttctgttcacgtagaagaatactctttggaagttcgtgaaacgaagcgtggtatggaagaattgacttctgatattccgaatgtaagtgaggaagctactaaagacctggatgaaaatggtatcgtaagaatcggtgcgcgtatcgaaccgggtgatatcatgatcggtaagattactccgaaaggtgaatctgatccttctccggaagaaaaactacttcgtgctatcttcggtgataaggcaggtgatgtgaaagatgcttctttaaaagcttctccttctttgaaaggtgttgttattgataagaaacttttctcacgtgtaatcaagaaccgtagctctaaactggcggataaagcattgttgcctaagattgacgatgagtttgaatcaaaggttgcagacttgaagcgcattctggttaagaaactgatgactttgactgaaggcaaggtttctcagggtgtgaaagactacttaggagcagaagttattgctaagggatctaagttcagtgcttctgattttgattcacttgactttacttctattcagctgagtaactggactagtgatgaccatactaatggtatggttcgtgatctggttatgaactttatcaagaaatacaaagagctggatgctgaattgaagcgtaagaagtttgctatcactatcggtgatgaacttccggctggtatcattcagatggctaaagtatatattgctaagaaacgtaagattggtgtaggtgataagatggcaggtcgtcacggtaacaagggtatcgtgtcacgtgttgtgcgtcaggaagatatgccgttcttggcagatggtactccggttgacattgtactgaatccgttgggtgtgccttctcgtatgaacattggtcagatttttgaagctgtattaggtcgtgccggaaaaactttgggcgtgaaatttgcaactcctatttttgacggtgctacgatggacgacttggatcagtggacagacaaagcgggattgccacgttactgtaaaacttatctttgtgatggtggtacaggtgagcaatttgaccaggcagcaaccgtaggtgtgacttatatgctgaagctggggcacatggttgaagacaagatgcacgctcgttctatcggtccgtactcattgattactcagcaacctcttggtggtaaagcacagttcggtggtcagcgtttcggagaaatggaggtttgggcactcgaaggcttcggtgctgctcatatcctgcaggaaatcttgactattaagtctgacgacgtagtaggacgttctaaggcttatgaagcaattgtgaaaggtgaaccgatgccgcaacccggtattccggaatccttgaacgtattgttacacgagttgagaggtttaggtttgagtatcaacctagaataaaataatgaaagaatgcaggatgtcaataggccgatgaaggtctgttgacattcgcatcttcttcaatttccaatgattcaattatcaaatctcaattatatagagtatggcttttagaaaagaaaataagacgaaaagcaatttctcgaagatctcaattggtctggcttctccggaagaaatcctagagaattcgagtggtgaagttttgaagcctgaaaccataaattaccgtacgtacaaacccgaacgcgatggtttgttctgcgagcgcatttttggtcctattaaggattacgaatgccattgcggtaaatataagcgtatccgttataaaggtatcgtctgcgaccgttgtggtgtagaagttacagaaaagaaagtacgccgtgaacgtatgggacatatacagttggtggtgccggtggcacacatctggtatttccgttcgcttccaaataagatcggttatttgctcggactgccgacaaagaagctggattcgattatatattacgaacgttatgttgttattcagccgggtgtaaaggctgaagatggcattgccgaatatgatttactttctgaagaagaatatctggatattctggatacacttccgaaggacaatcaatatttggaggataatgatccgaataagttcatcgctaagatgggagctgaagcaatctatgatttgctggctcgtttggatctggatgctctgtcttatgaattgcgtcaccgtgcaggcaatgatgcttcacagcaacgtaagaatgaggcattgaaacgtctgcaggttgtagaatcgttccgtgcatcacgtggacgtaacaagccggaatggatgattgtacgtatcgtaccggttattccgcccgaactccgtccattggttccattggatggtggtcgttttgctacttctgacttgaatgacctttatcgtcgtgttatcattcgtaacaaccgtctgaagagattgatcgaaatcaaagctccggaagtaatcttgcgtaatgagaaacgtatgcttcaggaatctgtagactcattgttcgataattcacgtaaatcaagtgcagtgaagacggatgctaaccgtccgttgaaatcactgtctgatagcttgaaaggtaaacaaggacgtttccgtcagaacttgctgggtaaacgtgttgactactctgcacgttcggtaattgttgttggtccggaactgaagatgggtgagtgcggtattcctaaattgatggctgccgaactttataagccgtttattatccgtaagctcattgaacgtggtatcgttaagacagtgaaatctgcaaagaagattgtagatcgtaaggaagcggtgatctgggatattctggaacacgtaatgaaaggacatcctgtactgttgaaccgtgctccgacattgcaccgtttgggtatccaggcattccagccgaagatgatcgaaggtaaagctatccagttgcacccgttggcatgtacggcattcaacgccgacttcgacggtgaccagatggctgttcacttgcctttgagtaacgaagcaattcttgaagctcagatgttgatgcttcagtcacataatatcctgaatccggcaaatggtgcgcctattactgtgcctgcacaggatatggttcttggtttgtattacattaccaagttgcgtgccggtgctaagggagaaggacttacattctacggaccggaagaagcattaatcgcttataatgaaggtaaggtagatattcatgctccggtaaaggtgatcgtgaaagacgttgatgaaaatggtaacattgttgacgttatgcgtgaaacttctgtaggacgtgtgattgttaatgaaattgttcctcctgaagcaggttatatcaatacgattatttctaagaaatctcttcgtgatatcattagtgatgtaatcaaggtttgtggtgtggctaaagctgcagacttcttggatggaatcaagaacttaggttaccaaatggcctttaagggtggtttgtcattcaacttgggtgatattattatcccgaaagaaaaagagacattggtacaaaaaggttacgacgaagttgaacaagtcgtaaacaactataatatgggtttcattaccaacaacgaacgttataatcaggtaattgatatctggacacatgtgaactctgagttgtctaacatcttgatgaaaactatttcttcggatgaccaaggatttaactctgtatacatgatgctggattcgggtgcccgtggttctaaagaacagattcgtcagttgtccggtatgcgtggtttgatggctaagccccagaaagctggtgctgaaggtggtcagattattgaaaacccgatcttgtcaaactttaaagagggactttctgtgttggagtactttatctctactcacggtgcccgtaaaggtttggcggataccgctttgaagactgccgatgccggatatttgactcgtcgtctggtagacgtttctcacgacgtgatcatcacggaagaagactgcggtacacttcgtggattggtttgtacagacttgaagaataacgatgaagtaattgctaccctgtatgaacgcatcttagggcgtgtttctgtacatgatattattcatcctactacaggcgaattgcttgttgccggtggtgaagaaatcacagaagaagttgctaagaagattcaggattctccgattgaaagcgttgaaatccgttctgtattgacttgtgaagcgaagaagggtgtttgtgctaagtgttacggacgtaacctggcaacaagccgcatggttcagaagggtgaggctgtcggtgtaattgctgctcagtcaatcggtgagccgggtacacagttgacattgcgtacattccacgccggtggtactgctgcgaatattgcggcaaatgcaagtattgtggctaagaacagtgctcgtctggaatttgaagaacttcgtacggtagatatcgtagacgaaatgggtgaagctgcaaaagtagtggtaggccgtttggctgaagttcgttttgtggacgtaaatactggtatcgttctttctacgcacaatgtaccttatggttctacattatatgtatcggatggtgatctggttgaaaagggtaagttaattgctaaatgggacccgttcaatgccgttattataactgaagcaactggtaagattgaattcgaaggtgtaattgagaatgttacttataaggtggaatcggatgaagcaaccggtcttcgtgaaatcatcattattgaatctaaggataaaacgaaagttccttcggctcatatcctgacagaagacggcgatctgattcgtacttataacttaccggtaggtggtcacgtgattattgaaaatggtcagaaagtgaaagccggtgaagtaatcgtgaagattccgcgtgctgtaggtaaggcgggtgacatcacgggtggtctccctcgtgttactgagttgtttgaagcacgtaatccgtctaatcctgctgtcgtttctgaaattgacggtgaggttacaatgggtaagatcaagcgtggtaaccgtgaaatcatcgtaacttcgaaaacaggtgaagtgaagaagtatcttgttgcattgtccaaacagattctggttcaggagaacgactatgtgcgtgctggtactccattatctgacggtgctactactccggctgatatcctggcaattaaaggtcctacggctgtacaggaatatattgtgaatgaagttcaggatgtataccgtctgcagggtgtgaagatcaatgataagcattttgagattatcgttcgccagatgatgcgtaaggttcagatcgatgagccgggtgatactcgcttcttggaacaacaggtagtggataagcttgagtttatggaggaaaacgatcgtatctggggtaagaaagtcgttgttgatgcaggtgattctcagaatatgcagccgggacagattgtgactgcccgtaagttgcgtgatgagaacagtatgctgaagcgccgtgacttgaaacctgttgaggtacgtgatgctgtagctgcaacttctactcagattcttcagggtattacgcgtgctgcactgcagacttcaagctttatgtcagctgcatccttccaggaaacaacgaaggtgttgaatgaggctgctatcaatggcaagacagataaacttgaaggaatgaaggaaaacgtaatttgcggtcacttaattccggcaggtacaggtcagcgtgaatttgaaaagattatcgttggttcaaaagaagagtatgatcgtatcttggcgaacaagaagacagtactagattacaatgaagtagaataatacaattcaattgactatatgaaaaaggagcgattgctgtagcaggcagttgctccttttttttgtttcttttacctgactgtatcattcttatctcgataaaattttgttattttgcaaaaaaacattttatcttatttaatatggaagaacaaaataacaaccagttacagatcgagttgaaagaagaagtagcgcaaggaacttatgcgaatcttgcaatcattactcattcaagctctgagtttattctagactttgtacgggttatgccaggagtgccgaaagcaggagtgcaatctcgtattatagtagctccagaacacgcaaaacgcttgttgcgggcattggaggataacatagcaaagtatgaacgtgcttttggacctattcgtatttctgaagagtcaccgatgcctccgctaagtgttgtaaaaggcgaagcatgaggttgatataaaaacattaaaaaagaaaaaaaagttgtagcgcattgaatattcaaatattattcgtatttttgcagcccaaaatgtatagttacgaaattaatataacaataatataaatcaaaaaacaattaaaatgcctacaattcagcaattagtaagaaaaggacgcgaagtgctggtggagaaaagtaaatctccagccttggattcatgtcctcaaagacgtggcgtttgcgtgagagtatatactactactccgaagaagccgaactctgcaatgcgtaaagtagctcgtgtacgtttgactaaccaaaaagaggttaactcatacattccgggagaaggacacaacttgcaggaacactcaatcgttttggtacgtggcggtcgtgtaaaagaccttcctggtgtacgttaccacattgtacgtggtacacttgatactgcaggtgttgctggtcgtactcaaagacgttctaaatacggagctaagcgtccgaaaccaggacaagctgcgccggctaagaaaaaataaggattaaaacctaattagaattaaagtaataacttacgttttagtttgttggaaatgctaaaggttgagtaaattctccggtgggagagttgaagaagtcaagaagtagacagccaagaacaaaaacattatttttcaaacaaatgagaaaagcaaaaccaaaaaaacgcgtaatccttccggatcccgtttttaatgaccaaaaggtttctaagtttgtaaaccatttgatgtatgatggtaaaaagaatgcgtcttatgaaatcttttatgccgctctggaaacagtgaaagcaaaacttcctaacgaagaaaaatcagctctcgaaatctggaaaaaggctttggataatgtaactccgcaagtagaagtaaaatctcgtcgtgtaggtggtgctaccttccaggttcctactgaaatccgtcctgatcgtaaagaatcggtttcaatgaaaaacttgattctgtttgctcgcaaaagaggtggtaaatctatggcagacaaattggctgctgaaatcatggatgcctttaacgaacaaggtggtgcatacaaacgtaaagaagatatgcatagaatggctgaagctaaccgtgcatttgcccatttcagattctaatactataagaatataaccgatttagattaaaaacttaaagtaaaggaataagaaaatggcaaagacagatttacatttgactcgtaatatcggtatcatggctcacattgatgccggaaaaacaacaacttctgaacgtatcctgttctacactggattgactcacaaaattggtgaggtacacgatggtgctgcaacaatggactggatggaacaggagcaagaacgtggtattactattacatctgctgcaacaacaacaagatggaaatatgctggtgatacttataaaatcaacttgattgacactccgggacacgttgactttactgctgaagtagaacgttcgttacgtattctggatggtgctgtggctgcttactgtgcagtaggtggtgtagaacctcaatcagaaactgtatggcgtcaagctgataagtataatgtgccacgtattgcgtacgtaaacaaaatggaccgttcgggtgctgacttctttgaggttgtacgccagatgaaagctgttttgggtgctaatccttgtccaatcgttgttcctattggcgctgaggaaaccttcaaaggtctagtagacttgattaaaatgaaagctatctattggcatgatgaaacaatgggagctgactatacagttgaagaaataccggcagatctcgttgatgaagcaaatgaatggagagataaaatgcttgaaaaggtagctgagtttgacgatgctttgatggagaaatatttcgacgatccttctactattacagaagaagaagtgttgagagctcttcgcaatgcaacagttcagatggcagttgtaccaatgttgtgtggctcttcatttaagaataagggtgttcagacattgttggactatgtttgtgctttcttgccttctccattggatactgagaatgtgattggtacaaatccgaatacaggtgcagaagaagatcgtaaaccgagtgatgatgagaaaacatcagctttggcatttaagattgctactgacccttatgtaggtcgtttgactttcttccgtgtatattcgggtaagattgaagctggttcttatatctataattctcgctctggtaagaaagaacgtgtttctcgtctgttccagatgcattcaaacaagcagaatccggttgaagtaatcggtgctggtgatattggtgcaggtgtaggttttaaagatattcatactggtgatacgctttgtgatgaaacagctccgatcgtattagagtctatggacttcccagaaccggtaatcggtattgcagttgagcctaaaactcagaaagacatggataaattgtctaacggtttggctaagctcgctgaagaagatccgacatttacagttaagactgatgagcaaacaggacagactgtaatctctggtatgggtgagttgcacttggatatcattattgaccgtttgaaacgtgaatttaaagtagaatgtaaccaaggtaaacctcaggttaattataaggaagctatcactaagacagttgatcttcgtgaagtttataagaaacagtctggtggtcgtggtaagtttgcagatattatcgttaagatcggtcctgttgatgaagatttcaaagaaggcggattgcagtttatcgatgaagtgaagggtggtaatattcctaaagaatttattccttcagttcagaaaggtttcacaagcgcaatgaagaacggtgtgttggccggatatccgttggattcaatgaaagtaactttgattgatggttcattccacccggttgactctgaccagttgtctttcgaaatctgtgctattcaggcatataagaatgcatgtgctaaagcaggtccggtattgatggagcctatcatgaaactggaggttgttactccggaagaaaacatgggtgatgtgatcggtgacttgaataagcgtcgtggccaggttgaaggtatggaatctagccgttccggtgctcgtatcgtgaaagcaatggtgccactggctgaaatgtttggttatgtaacagcgttacgtactattacatcaggtcgcgcaacttcatcaatggtatattctcatcacgctcaagtttctaactctattgctaaggcagtattggaagaagttaaaggacgtgctgatttactctagaaaaatatcaaaagcagtaggctagcgaatgactcttagcctgccgctttatcttatttataaatatattaatttgaaaccataatgagtcagaaaattagaattaaattgaaatcttacgaccacaacttggttgacaagtcagctgagaagattgtaagaaccgtaaaggctacgggtgctattgttagtggtccaattcctctgcctacgcacaagcgtatctttacagtaaaccgctcgactttcgttaacaagaagtcacgtgaacagtttgaactctcttcttataagagattgattgacatctatagctcaactgctaagacagtagatgctcttatgaagcttgagttgccgagtggtgtggaagtagaaattaaagtttgataattaaaaattagtgaaatgccaggattattaggaaaaaaaatcggaatgacatccgttttcagtgctgatggtaagaatgtaccatgcactgttatcgaagcaggtccttgtgttgttactcaggttaaaactgtcgaaaaagatggctatgcagctgttcagttgggtttccaggacaaaaaggaaaaacatacaactaaaccgttgatgggtcactttaagagagctggagtaacaccgaagagacacttggccgagttcaaagaatttgagacagagttgaatctgggtgatactattactgtagagatgtttaatgacgctactttcgtagatgttgtcggaacttctaaaggtaaaggcttccagggtgtagttaagagacatggtttcggtggtgtaggtcaagctactcacggtcagcataaccgtgctcgtaagccgggttctatcggtgcttgttcttatccagctaaagtattcaaaggaatgcgcatgggcggacagctcggtggtgacagagttactgttcaaaacttgcaggtattaaaagtaatcgcggatcataaccttcttttgatcaaaggttctatcccgggttgcaaaggttcaatcgtaataattgagaaataatggaagttaacgtatataacattaaaggtgaagacactgggagaaaggttacgttaaacgaatctatcttcggaattgagcccaacgaccacgctatctatttggatgtaaagcaatttatggccaaccagcgtcagggtactcataagtcaaaagaaagaagtgaaatcagtggctctactcgtaagatcggtcgccagaaaggtggtggtggagcacgtcgtggtgatatgaattcaccggtgctcgttggtggtgctcgtgtttttggtccgaagccaagagactacttcttcaagttaaataaaaaagttaagacattggctcgtaagtcagcattgtcttataaagttcagaacaacgcgcttattgttgttgaagacttcgtttttgaagctcctaagacaaaagatttcgttgctatgacaaaaaatcttaaagtttccgataaaaagctacttgtaattttaccggaagcaaataaaaacgtatatttgtcagctcgtaacatagagggtgcaaacgtgcagactgtctcaggattaaatacttacagagtattgaatgctggggttgttgtgcttacagaaaactctctgaaggctattgacaatatcttaatttaaaaaggaggcttaaataatgggaattattattaaaccgttggtaacagagaaaatgactgcaatcactgataagctgaatcgttttggctttgttgtacgtcctgatgctaacaaactggaaattaagaaggaagttgaagctctttataatgttactgtagttgatgtgaatacagtgaagtatgcaggcaaaaataaaagccgttatactaaagcaggtatcatcaatggacgtacgaatgcattcaaaaaagcaatcgtaacattgaaagaaggagatactattgatttttatagtaatatttaataaaaatggcagtacgtaaattaaagcccacaacaccggggcaaagacataaaattattggtactttcgaagaaattactgcatcagtaccagaaaagtctcttgtatatggtaagaaatcatctggtggtcgtaacaacgaaggtaagatgactatgcgctacattggtggcggtcatagaaaggtgattagaattgttgatttcaagagaaacaaagacggtgtaccagcagtggttaagacaattgaatacgatccgaatcgttcggctcgtatcgctttgttatattacgctgatggagaaaaaagatatattattgctcccaatggattgcaagttggtgcgactctgatgtcgggtgaaacagcagcgccagagattggtaatactcttccccttcagaacattccggttggtactgtaattcacaatattgagttacgtccgggacagggtgctgctctggttagatcagctggaaactttgctcagttaacttctcgtgagggtaagtattgtgtgattaaattgccttcaggtgaagtaagacagattcttagcacttgtaaagctactatcggtagtgttggtaactcagatcatggattggaacgctcaggtaaggctggacgctctcgttggcaaggtcgtcgtcctcgtaaccgtggtgttgtaatgaacccggttgatcacccgatgggtggtggtgaaggacgttcttccggaggacatccaagatctcgtaagggattgtacgctaagggacttaagactagagctcctaagaaacaatcgtctaagtacattattgagagaagaaaaaagtaatctgattaattgagtaaactatgagtcgttcattaaaaaaaggtccatatattaacgtaaagcttgaaaagagaatttttgccatgaatgaatctggcaaaaaagt

SEQ ID NO: 4586 - DNA, 114323 bp, Unknown
  gut microbiota DNA sequence
gtttgaaacttttgtttctcatgcttggaactaaagtttcatcggcttgaaactttagttccaaagccgtgaaaacaaagtttcggacgcttgaaaacagtggttccagcctatggaatgaatgaaacaaggcaggaaactgatcccttacttatatgattcaattaacttgaccgcaccaactgttcgattaacctgctcttccaagaaacaataaatcatttatcactcaaaaacagcggagttatcaactattaaaggatgatttatcaattattaatgtctgaaatatcaatcgttaagaattgacacctcagacattaatacactgtaaatcaaatgacaacatcaaacaaatgacagataatgatacatggaagagtgagagcaaacacttgctctcataactgctaccacagttgctgccatacctgaaactaagatgaataaagggatgcagacaaattgttagagcatgagagcaaaaacgcattcaaattacgtggggagcctgattatctctaggagaataatatgctagaccaagaatcagtttacaacacaaaaagtgacggcaaaaagcgtaaaactcttgccgtcacttagccatcagcatttgccgtcaccgctattggtctatatattaatactttattctaaaaagtgacgggtgacgataaaaaacatagtttcaactctaaaataattattttatcttaagggcaaaacctcctcccggtgccagatgaactttcagtttaccgtctttctttatcgggaaggactcacacttataatcacgacctgcccgatgagcattcacaccatctttaaacaaagtagcatgataagatttatcacccaggaaagaacaatcgacttcaatatcacgtgcactccaatctgtaattccacctacataccagacatcccctttccggcgtgctgtcacaatatactctcccattttaccgtcaagaacgatactttcatcccatacagttggtatttctgcgataaatgccgttgattccggttcgcgcatatagttgctcggagtatcgcacaacatattaaaaggagattcaaacaccacgtacaaggctagttggcggcaacgggttccctgactcatcggttctgaataacaaggataatagttacccttggaagcattcctcatcgccccctgcgtataatccatcggaccggaaacctgacggatgaaaggaatcatcacatcatacttcacctgatctactgacggtgaactccatttcatctgctccaacccattgactccttcgaaattcaacacattcggataagtacggttcaatccggcaggcttatgagtgccatgcaggtcaagaatcagcttgtatttagcacacatttcagcggcacgatagttgaatgcagtcatttcctgatcgtcacggtccataaagtccactttgaaaccctttactcccatttcggcataatgacggcacacattttccatatcacgctcgaatgcatgataaccggcccaaaggatgatacctacatttttggaagctgcgtaatctaccagttctttcaggtcaatctccttgacaacctgcatcaaatccgcctgtaagttcactgcccatccctcgtcaagtatcacatactcgataccgtttgcagaagcaaagtctatatatgccttataagtcggattatttactccggtcacaaaatcaacgccatccagattccagtcattccaccagtcccaagcaacctttcccggtttaatccatgaaagatcggacatacgtgaaggcgcacctaacaggtagctgagattggtagcggcaaggtccttatcggtggtagtaaccacggctatacgccaggggaagtttctcggcttatccactttggcaatgtagtcttcatgctccttcaccaacatctgaagctggttgtgaccaccctgtaccgtacgcttcggataaggagcatgcatactgctcagacgattcgcgccttccgaagcagaaagataaagtcccggataattttccagatcggactctgtgatacagactttcactccatcgcccgcatctactaccaacggcaagaacatcaagcgctgtttattcagcttcgacagtttgtccgttgtatacgtattctcgaaagaattaaaaaactgggagttataatcaccgtctttaccgctttttacataaggcacggaggcagtcatatccgatggaaaacaataatcagatacttccgtcaccacacgaaaaggcttcttcccctgattcacaaaacggtaggcgataccgtcattgtatgcacgaaactctacattccagtcttttttgaaacgcaaggtcagtccattataatgatttctcaattcgctggcacggtagaaaggagatggtatcatctcgtccacactcttcctggaagttccggataatttcgcattttctccccagacagtcccgttatccaacgtcattgatatgggagaaggagtcagaatctgcctgccgttgcatgtaatgtcataagtcagccggtcgccaatggttattgtcgttttcagatttccatcaggtgaggctagtgtaaattgcttctgagcttgcaacgaaagcgtacacaagacacataataataaaaatgtaagttttttcatggttgtaactaatatattagatttcaaaataattattccgcaataaagcgctttgtctgtacatcacgactgttcgtacctatcatcacgtcaaactctcccggttcgtagatatattgcagcccggaattataaaatttcaggtcatcttccgtaagtacaaacttcacttcacggctttctccttttttcaggaagatacgatcgaagcctttcagctctttcaccggacgcgctacttccgcatagatatcacgcaaatagatttgtaccgtttcatagccgtcatggttccctttgttggtgacggtaacggaagctgtcaggtttccatttttcggcaaggtttccgaactgagctgcaggtcgccatatacaaagtcggtataactcaaaccgtatccgaaaggataaagaggttcgttactctcatccagatagttgctggcataccggttgaaaacacggttgtccgggtccggacgtccggtgttcaaatgattgtagaacaaaggaagttgccctaccgaacgagggaaggtagtagtcagcttaccgcacgggacggctttgccaaacagaacatcggcaacggcatcccctgtctcactacctccgaaccatacattcagaatagaaggaatgtgttcgctttcccagttcaagatcaaaggacgaccggtgaacaggagcagtaccacaggcttacctgttttcaccaatgctttcaataagtcctgctgagcgtcagggatttccagattagtacgggaaggagattcaccactcatttccgcacattcacccacagcagccacaatcacatcggcacgggcagccgtacgcaatgcctcggccagcagttgctgatcattaccacgttccaacggacggatgccgacagctcctttttccatttccgcatcataatatacattgctgcctttggcataaagtatttcagccttgtctcctactgccgaccggattccttcgagtaatgtaccatgtctggacggagtacaggtcatgctccacattccgcacatattattgcgtgcatctgccatcggacctattaatgcaattttccctttttcctccaacggaagcaggtgattctcatttttcagtagaacaaacgtctctgccgcaacctcgcgtgcaactgcacgatgctcaggcgtataaagttctttttccgcacgtaacgtatcgcaatatttatatggatcggcaaacaagcccagtttatacttagcctccagcacacgacggcaagctgcatcaatctgtgcttcggtgactttcccctctttcagcgattcttccagcgtattgagaaagccgcaggaaaccatgtccatatccgtcccagcctgcaaagcacggacagaggcttccttcaaaggagccacaccatgaatggacatttcagcaatggaattgtagtctgtgaccaaaagtccctgaaatccccattcgtcacgaagcacgtctgtcaacagccatttatttgccgtagccggtatgccgtctactatattaaaagaactcatcacactaccgacatcagcctcaaccgccgcccgataaggagcaaaatattcgttatacatacgcagatggctcatgtcgactgtattataatccttaccggcttctgatgctccatagagggcgaaatgttttacacaagaaaggatttcatcttttccctgcatactgtcaccttgataaccgtgcacataggcctttgccaacagtgaacccagataagggtcctcaccgcttccttcggcaatacgtccccaacgggcatcccggcagatatctaccatcgggctgaatgtccagcaaatgccatccgcactggcttcaatggcagaaatccgcgccatccgctgaatagccaacgtatcccaactgcatgagagggccaacggtatcgggaaaatcgtttcataaccatgtatgacgtccgccccgactatcaagggaattttcaatcggttttcttccactgccagccgttgcagatcatagatttttttgattccttttacattgaaaaagccaccgatctcttctttgcgaatcatatcactaagctcactattcatcaccgagcctgtcaccaagtcgccaccggaaggaaggttcaactgtcccagcttctcacggatcgtcattttacccatcaggtctgtgacaaagcgatccatctctacctcttttcccccaccagactccgaacaggaaaagaatataatgccacaaatggcaccaaacaccagatttcttattttcataagctcttcaaattatttatttacttttctgactttaccttctatacaataacggcaacatcggtcaacagaatctatttcgccaaagttaacacttccttctaaataatgagacatatacccgcaaaatagattatttatttctgtcaactgaatctatatacaatagacggttcagaaagaaaaagccacattaattcagagctacaaattttccatccttaatataaataggtgttatcaccggatgttccgtctgcgaattcggtgcatgataagaaatcatcagcctgcctttaagatccttgaataccatcgcgtgtccgccatcgtcactatttaacgtttcgggctcctgcacccaaggaccaagaacattacccgatgccgagacagcctgcccgatggcatattttccatctgtctttcggaaactggaccatagcataatcagttttccatcatccagacgatagataaaaggagcatccgtaacattgcccgtcaccccggaacttgtaatagagcctacccagggagcttccgaagccttgaacaacagatacgaatcaccttctgtcgttttcagatctttcgccagccgttgggcataaatttcaccgtcgatggtctccagccactcacgacagaacaacagccagggatttccttctttgtcaatatacaaagatccatccagacacatccagccggaaggagtaatcgccttgtttacaagtggagtgaaagggcctttcggactatcggaaactagaatagaagttccccgcttcactcccgcattactgaaagtagcaaataaataataacgtccttcatattcatacacatccggtgcccaaaaatcctgttgcccccagaaatcagttttagctataaaagaatatccttcgtctttccacgtggacaggtctttacttttataaactctgattttcaagttattattgaaatgaagataatacatcgaagttttcttgtcgaccagaataaacgggtcccgcaaacgcaaactcgatacaggaatcgtgaaactttctccccctacttcatccggatcggtggaggaagtctgtccatcatcattactacaactgacaatacacgctcccatcaataacaagagcgaaagaatagaatgctttaactttttcatatatcaatgattatttaataaaatacctattgaaaactgataaataaattgttcaagatcaataatgaggattctgctcgatatgagaattttcaataataaccgatgtaggaatcgggaacaaaagattcttctctgagaaattagtactatacttcttaccggtttctacatatttccccatccggatcaaatcttccctgcgctttccttcataccagaactcccagcctctttctttcagaatccagtctctcaacgactccttatccgggaaatcggataattgctttatgatagcgtctccaccatcagcagcctgttccattgctgtaaactcgatttcatcaatccaaagttcatatccgcttccggaatttcccaaagcaaggaacagagcacaattttgatcttccgtagctttacctgtctgtgtggagaattcctttacttcgcctgctttcaaagagatggattccatgtggctcaatggtccttcaacgcgtatttcaaactgaatgtctttcgaggctttcagcttcatctttattgaatacttacgcccttttgcaaccaaaggttctgttcgcatctgcaaagtccagaattctgtacccgaagattcaacttccacatgtaagctgtttccgttattcaacgtgttgtttttatccacatcatacttccaggcagatccaccggcctgatcgtagttattcatcgagaatatccctataacattgtcaacaaactctccgtcaaagctctctttaaaaacgggtattgcaggcagcgaggtgccaaagccaaaagcacgtttccggatatcattaatcagatcgacactcccttgattaggaccattcagttcattcaatgcttccgccttaaataacaacacttctgcatatcggtcgagtaccttgtcattgcctgcccatgtgcctgtagcttcaggatcaatcccatatttcaaaggcaaagcacctacatcaccactggctctcaaatcaactgtagcaccggactttgatgtatattcggcctgtgccaaagctcttcgccggtcattttcatcaaacgtatcatagaattcccacggcatccggtgtccggaccatccttctacgatgtttccataaggtgaagcgtagtcacccggcaaaatatttgcatatgtatgattaccataatctgccagtggttcagctctcacaacaaacatcagttctttattaccttcgttctgagctgaaaatatacttgcataatccttctccagttcatagtaattcagaccgataatctcatttgccgtttcgagagcattctgccactgcttttcatgcatataatatttcagtaaataatgcagggcagctccctttgtgatacgtccgtattcagcttgttctaccggaagtgcgtcggcagcagcacgtagttctgtcgtcaggaaagttccgacttcttcagacgtaggtctgtaaggtttataatccgggtccggattgattgcctggtcggcttccagaatcattggcataggaccataaagccgatataaatcgaacatgaaaaaggctctgagcgcccggacctccgcaatatacaagtctttcaccgactgagctaccggagactcttccatcttcgctatcgtataagtgcaacgggtgatattaggggcagtccagttatagaatcctttcaccatctggtcagcatccgtccacgaaccattcagaaaagcaacccatgaccacttggtagtccattcttcggttgaaacttcatccattacaaaagaacttccatcacaaaacaaataaggtccccagcctttttggcgtaattcataataaagggcaaccgttgcagccgaaaggtctgcaggagtattaaacgcattcccagtatctacaactccatacaagtgaggttccaagctcccctcacaggctacaaactgaatgcttataaatagtaataatagttttttagctaatttcttcatgacattccagtttaaaatttcacatcaagtccaaatgaaaaagtcttctgttgaggatatgacgcccggtcgttttcaacttccggatcgagtcctttatatccggtaaacgtcagcagattctgaccggaaaagtaaaatcttactttcaacttatcagctttaaacagtctgctcaaatcatatcccaacgttacgttcttcagacgtaaatatgtattcttctcccagttcggagcaccgtagctatcatagctgttcacttcgccactaggcatagcagaactcatgttgtcggaagtccaacgattttttatatccgccaaaaagttattattgtctttcagcctctggatgccgtttccaccatacaccccgtgttctacctgagtgtaaggataggagtatccgccaaccgaagcataaagatagatattcagatcaaatcctttgtaccggaaatcattcgaaaatcccatagtaaacttcggtgcacgtgtccccagatatacgacatctgcctgatctattttcccatcaggctttcctgtcagattcccttcctcgtcgagtccgttcacatctttatatttgcgctgtcccggtaacaagtccggcatagccggcgtatcttcacccgcctgctttataccgtccggaatcagcgtatagatagcacttaccggatcgttttctttgacataaggagccagaattactttcggatcacgttctttccatctgtcacgataggaagtatacgtcaatgtcgattcccaatgtaacggtccttccaggttcactgtattcagcgtcagttcaaaaccggtactttttgtttttccaatgttggaccatataccggtagtgacagctgtatgcggcagcgaacgccagctcagcaggtcttttacctctttaaagaaaacatctacactaccattgatacgattccggaagaaaccgaaatccagtccgaagttaacttctgtagtcgtttcccactttaaatcaggattaccgaactttcccagatttactcctctcttttctgtatctcccagataataatttctgccgtcaaaggcaaagtactcggaagcagcatcgttaggcagattttcattacccacctgtcccatgctgacacgcaacttggcatcggagagccagttgacatctttcagaaaatcttcctgattcattctccacgcaaatgctcccgaaggaaagaaagcataacggttgttctttccaaaacggtcgctaccatcgatacgggcagtaaaagtaaacagatacttgtctttgaaagagtattgggcacgaccaaaataagaagccaacacgtgtttatttttataagaactgaccaccggacgcgtttcacctgcctgtagtttataatacatcaacgcatcagacataaatcccatagcacgtgcatacgctccgtcatcattctgcacctgatacgaatatcccagtaatgcaagaagtttatgtctctccttgaaagtcttctgaaaattgaaaaccatatctgccacatagtcttcacggttggcggaattgatattcgcatctccattcacactacttccatatttcgtagtcatcggatagtagctatggcgggacccgtcgcggatatccgcaccggcagacagtttcaaccagaacacatcttttataaaatagaaattagtgaatgctgttgccagaaaacgcttggtctttgtctcatcctcaatgtcgagataagacaaaggatgattgagcaatgcctgcttaggatcttccatccatttgccggtcgtcgggtctcgttccgccttcactgtcggactataacttaacgccgattcaataatacctgccgtactgtcatatcctccccccagtgtcgcattctgatcgactacataagaggctgtggcagaaataccataatcccaccatttcgttattttatggtccagattataacggaagctatagcgtttataaccggatgttttcaccactcctttctgatcgaagtagttcagcgaaatcaatgatctcatcttttcattaccataagtcactgtgaggttatgttgctggataagacctgtacgggtaatcatatcataccagttggtcccttttccggcttttgctatttcttcatccgtgtacataggcacataagggctgacagcacccggatctgtattcccataaggatataccagattctgcattaaatactgttctttatagtaactgttctgagtagtcattaactctccggccgtcaataattccggtcgtttatttatagtctgaaacgacatattcatgttatactctactttcgtatcctgagtacctctttttgtcgtaatcagaacaactccattagcaccccgcgcaccataaatggcagttgccgaagcgtccttcaaaatctctatggattcgatatcgttagggttaatactgctcaaagggctgttgcttcctgccgtccactgattaccgcttcccggattgacaccggcattcactatggggaaaccatcgaccacatacagcggatcattccccgcaccggtagaagccgcaccccgaatcagaacttcaataccaccaccgggctgtgcactcccctgttttacagtaagtcctgccgcacgtcccatcaacatttcagagaagttcggtgaagctgctttattgagtttctcagactttacagaaacaatcgaagcattcaagtcacttttcttcattgtaccgtatcccactaccacaacttcatccagcaattcttgcttttcatacaaaacgatggataaatctgtctgatttccaactttcacttccagaggctgataaccgatgtaagatagttccaataccgctcccggcgatacttccaacgtaaacttcgcatttatatccgataccgttccgttagttgtccctttctccttgatggtaacaccgataataggctcgccgttaacatcgttcaccacacctgtgatcttacgttttttaccatcctttgaggttttctgcctggcttgtcctttctgaacaattacattcttccctttcacttcatagacaacgtcttgtccgtacaatatctgatcgatagcctcattcagctctttcgcctttacagttataatcttctttgtatccagatctccgactttataaacgaaagaatatccgcttttattcttcaactgggtcattgcttctttcactgaaacgttatccattttcaatgaaacagcctgggctagtattgctatgttaaggcaaaacagagccatgaccattaatatggccttcttcctgtaattcataaaataaacaaattattaattaaaacttgaataactcgttttaaaagagatgtattttgctaactttgcacattctcttttgaaaacatattcacactagatgattgttgaaagaagagattcaaggagccgggagatgtccgaaatcttccggttttttatttgtctctccttatttgtcagctaaagattattctgtatttttctctttattcatacttttcaatttttaaggttaaacaatcatagcattataatctctggtaaccggttagtagatagttatattacgttcttcaatcttatattgcattttttccgtagaagccagtgcttccagtacttcctggatattttgttcacgacgaacgaagttgccatagaagcggaatgtttttaaggaatcattggctatgtgaatcttcacattatagctacgttccaattctttggcgatatccggtaagagttcttcatcaaaaaacaagtaaccgtccgtccactgagacgcattggatgcggtaaccgactctacagtcaaaagcccgttcgccttatttaatacggccctttcatcaggtgaaaggactgcttctttttcttctctcaacaagttgttcaatccgaccttaccttccagcaaagaaacgaccacttcatgatcttccggatagtcacggaaattgaattttgttcccaacacctgtaattgcaagtctttagtctttacgaaaaagggaatcttctcattccgctttacctcaaaatatccttccccttccaattctacttttcggttatcgacaccaaacccctgcgagtatgtcatgcgtgaaccggcattaagccagactaatgtgccatccggcaaataaagttttgtttttgatcctaaaggggcttctactgaaatatctgcaaaagtatctttcacattcacctctccctgccaataagaaatacatcccaccgctattatgattgcaacaaccgcagcataacgccacaacgctgacaggctaaaacctcgacgggaagtgctctgaatttccttctgactttcgacacggtttctaaaattctcaaacgctttatccttatcatagacagatgcggcttcacgacttacagctgaaaaccagatctcccgctgacggataaaatattgctgattttcagccgatgcggcaatccatgtttttagttcatctaaagcgttcttatccagaccttcagtcagatagttggcaatcagttcatcaatatgtttattttcttcttccatatttatgctttctataaaggagacagttgttttttaattaagggtagtcagaaaatgattttttttcgctttacctgaaaaaaaatagtaatagagaaatcaggtacttactcaaatgagcgtgtaaagaagctaaagcattctttatatgatacttaactgtattaatagatattcccagttcaccggaaatttcttcgtatgattttccttcaaagcgacttttagcaaaaacccgacggcattcgtccggcaatttatcgatagccttatatatttcgttttcaagttcacgttccagtaaaatacctaacggatgcgaatcggacagtatgattttatcatccgttatctcatcgggcataagagcagaaaatgctatttctctcttttcacgttccgaattaagatagttaatgcaacgattacggacagctctcagcaggtaactacggatagagactgaaatatccaaagtctcacgtatctcccataaatgaaagatagtatctcctacaatggtttcggaaaggaactgatcttttagataaccattggcaacataacagagcagggcatagtgatgatcatatatgtaacgataagcattttcattgcctatcttcagttgttccactattaaagtttcagtattctccatgaatgtaccagtcagattaatagcacaaatttagagaattattcgaatttaaagcatataaagccaaaaatccctccaaagaaaaaaactttggagggatcttctttatactactctgtatacagtctatttcatcttatatacgagtgtaccacctttcagaatatcttcatgagaaatcgtattctttgtataaggttcgccattcagcgtgatactatccacatatttatgttccttcgataagttttcagcgatcacagtaaaggtctttccatcagccagatgtagcacaatcttcggtaactgaggagctccgaatacataatcaccgcttaccggatctaccggatagaaacccattgcactgaacatataccatgcggacatctgaccacagtcatcattaccacaaagtccgtcaggcttgttcttatattgagtatcaaagatttcacggattagttcctgtgtacgttccggacgccctgccaaagcatataaataagtaacatgatgactgggctcattaccatgtgcatactgtccgatcaaacctgtcacatcagcctgggttgtttccagtttcactgtaaacagggaatccagcttgttcaggaaaggttcttctccaccgaagagagcaatcaaaccgggaacatcgtgttgcacatgccaggtatattgccatgcatttccttccgtatagtcaccgcctgtactttccgcatgtcctacatcactaggattaaacggagatttccaggttccgtcagctttacgcggacgcataaaattcgtctgtgaatcgaataagttcttataataatctgcacgtttcgcaaagtaagcagcatcttcttcttttcccatacgacgggccatgtcagctgccgcataatcgtcatataccgattccagagttgaagagacggattccgcttttgtcagatctgtcgggaaatatccgtatttcgtatacacttcccagtcggacttcaacggatgagatacagtctgtgtcttcttcaccatattgaaagcacgttccgcatcaaaaccacggaaaccttttcggtaggcttcagcaataacagatacaccatgattgccgatcatacagaagttttcttttccccacaatgcccaaataggcaggaagccttgtacttcaccttgttctatcaatgaattaacaaaaccatccacacgttcgggaaccattaatgtatagaatggatgagcggcacgataagtatcccataaagagaaggttgaatagaatgttcctgttccggccttcacaatcgaatcggcagcattacgatacataccgtctacgtctgaaatctggttaggctgaatcagtgcgtgatagaaacaagtatagaaattcgtcttttcatcatccgtaccctctacgtcaatgcgactcagatagctgttccattcgtcatgggcagccagcttcacaccgtcaaagttccagtctggtatttcagcctgcaagttcttctttgctccctctacgctggtagtcgaaagggccaccttcatcatcagttcatctcccggcttcaagtcgaaagtagcaatgattcgctttcctttctcagtttctcccatcggaaggtaaagcgaatctattaccggacgattaaacttcatcacaaagaagtagtcctgatcaacccagaccgtgttattcacgtgtccggtcagcgtctgagcatcttcccagttcacttcgcaactattcacttgtgaatgatattgttcttctctccaggcaggtccgtgctgcaagtcaatcagcagagaagctgaatccgctttatgatatgtataacgatgaagagctgcatggatagaagcagtcagttccgcctttacctgcggatcggataattcgactgtataatatcccggagtagcagcttccttgtctttcgggaaatggctgcggtaagcatcccatgcacgggcacgggtaccggtaaccggcatcaccagaatatcccccaaatccatacatccggttccgttcagatgagtctgagtgaagccccagatcagagagtcctgataagtatattccgaacaatatctccaacctactgcacccgtcaccggactggtctgtatcattccgaaaggatagcaagctccggggaatgtatgcccattgtcagcagcaccaataaaggtattcacatactgagtgtaatctttcgtttccgcttgctccgtcggagaacaggaagtgtacataaacagtcccgccaaagcaacggccatcacaggggattttcttttcatgataatcataatgttaagttaatgctacaaatttagagaataattctcaatgctacactaaaatacaatagaaaaatggtccccaagtccgatcattcaaaatttatatctaccctgttccgggcagcattctaaaagcaaataaacctgattcattgtgacaaaacaaaaattcgcacgacttattgaataaatatcaactcaattatttatctttgttagctttaaaacaagctgactcaaaaaaacaatagtataatgaaagatttcttgaaatttacgctcgccactgtgaccggtatcatcctgtcaagcattgtattatttattatcggcatggtaacattgttcggcattgtatcaaccgcggatacagaaacaatagtgaaaaagaattctgtgatgatgctcgacctgaacggtgtattagtcgaacgcactcaggagagtccgttaggtatcttatcacagttgttcagcgacgactccaatacatacgggctggacgatattctttcttccatcaaaaaagcaaaagaaaatgaaaatatcaaaggaatttatctgcaggcaagtatgctcggaacttcgtatgcatctttgcaggaaatccgtaacgcattgctcgactttaaagaaagcggaaagttcatcatagcctacggagatagctatacacaaggactttattatctttccagtgtagcggacaaggtattgctcaatccgaaaggaatgattgagtggaaaggcatcgcttccgctcctctgttttataaagacttactgcaaaagatcggggtagaaatgcagatatttaaagtaggtacttataaatccgccgtagaaccgtttatttctacagaaatgagtcctgccaatcgtgaacaggtgacagcttttatcaactcgatctggggacaggttaccgaaggggtatctgcttcccgcagcctccccgtagattcactgaatgctttagctgaccgtatgctgatgttttatccggcagaggaaagtgtgcaatgtggcttggcggacacattgatttaccgcaatgatgttcgcaattatcttaaacagtgggtggacttgaaagaagatgaccgccttccggtgctagggttgagtgatatgatcaatgtgaaaaaaaacatgccgaaagataaaagcggtaacatcgtagcggtctattatgcctccggagaaatcacagattacagcggttcttcaacttctgaagagggaattgtaggcacaaaagttattcgtgacttgcgtaagctaaaagatgacgaggatgtaaaagctgtcgttctccgtgttaattcaccgggtggaagtgcttttgcatccgaacaaatctggcatgccgtgaaagaactgaaaacagagaaaccagtaattgtttctatgggtgattatgccgcatcaggtggttattatatctcttgtgtagccgatacaatcgttgcagagccgactacattgacgggatccatcggaattttcggtatggtaccgaatgttaaggaattatcagaaaagatcggtttgacctacgatgtggtaaaaacaaataaattttcagattttggaaatatcatgcgtcctttcaatcaggatgagaagacactgatgcagatgatgattacccaaggttatgatacattcgtcaatcgctgcgctgaggggcgccatatgagcaaagaggccattgagaaaatagctgaaggtcgtgtatggacaggagaagctgctaaagaacttggactggtagacgtactcggaggtattgatacagctttggagattgctgtcaggaaagcaggaatcgaaggatatacagttgtttcttatccggcaaaacaagacctcctttcttcactgctcaatacgaaacccactaattatgtggaatcacaaatattgaaaaacaagttaggagagtattatcaacaattcggtatgctgaaaaatttaaaagagcgttccatgattcaggcacgcattccgtttgaactaaatatcaagtaaactgtactgcatggacgaacactttatcaagatacataagtggctttaccctgtctcatggatttacggggcagtggtaacagtaagaaacaaactctttgactggggattcctccggtcaaagagttttggtgttcctgtcatctgcatcggcaacctgtctgtaggcggcacgggaaagacgccgcacaccgaatatctgataaagctgcttcgtgataactatcatgtggcagtattaagccggggatataaaaggcatagccgaggatatgtgcttgccactccccaaagtactgcacgcagcatcggtgacgagccttaccagatgcataccaagttcccgtctgtcacactagctgtcgatgagaaccgctgccatggcatagaacaattactatccatcaaagaaccgtccattgaagttgtattgctggatgatgctttccagcaccgttacgtcaagccgggactaagcatcctgctgacggattatcaccgcctcttctgcgacgatactttacttccggcaggtcgtctgcgcgagtctgtcaacggtaaaaaccgggcacaaatcgtcattgtcacaaagtgtccgcaggatattaagccgattgactataatattatcacaaaacgactgaacctttatccttatcagcagttatacttctcatcgtttcgttatggaaatctgcaaccggtatttccatcagcaaattcagagattgattctacagtgaatgagttaccgctgagtgctttaacgaatacggatattttgctggtaacgggcattgcatcacctgcgcctattctcgaagagttgaaaatgtataccgatcagattgattcgctttcattcgacgaccatcatcatttcagtcatcgggacatacaacagatcaaggaacgattcggaaaactgaaaggtgaacataaactgattgtcaccaccgagaaagatgcaacccgcctgattcatcatccggcattgagcgaggaactgaaaccgtttatttacgccttgccgattgagattgagatattacaaaatcaacaagataaatttaaccaacacattattggctatgttagagaaaatacaagaaacagcagcttttctgaaagggaaaatgcacaccagtcctgaaacagccatcatccttggcaccggacttggcagtttggcagacgagatcaccgagaagtatgaaataaagtattcggatattcctaacttcccagtgtctactgtcgaaggtcatagcggtaaactgattttcggcaagttgggcaacaaagacatcatggcaatgcaagggcgttttcattattatgaaggttattccatgaaggaagtgactttccctgtacgtgtaatgcgtgagctgggtatcaaaacattgtttgtatccaacgccagcggtggtacaaacgaagcttttgaaatcggtgacctgatgattatcaccgatcatatcaactacttccccgaacatccgcttcgtggcaagaatattccttatggtccacgcttcccggatatgagcgaagcatatgataaggaactgattcgtaaagctgacgagattgctcaggaaaaaggcattaaggtacaacatggaatttatatcggtacgcaaggccctactttcgagactcctgctgaatataaactattccacattctgggtgccgatgcagtcggtatgtctaccgttcccgaagtgatcgtagccaaccactgcggaatcaaggtattcggaatctccgtcatcactgacttgggagtagaaggaaaaattgtagaagtatcgcatgaagaagttcagaaggcagcggacgcagctcaacctaaaatgaccactatcatgcgtgaacttatcaaccgtgcttaatactaaactctatttatgcgaactgaaatagcaactctcggcgagttcggtctgatcgaccgcctcaccgagggaattaaaccagaaaacgaatcaaccaaatacggagtgggtgatgatgccgccgtcctctcctacccttcggagaaacaactattagtaacaaccgacttattaatggaaggtgttcatttcgacctgacttatgtccctctgaaacatctgggatataaatcggccgtagtcaatttctccgatatctatgcaatgaacggtacgccccggcagatcaccgtatcgctcgctctttccaaacgcttcagcgtagaggacatggaagagctttattcaggcattcgtctggcatgccaacagtatcatgttgacattatcggaggcgatacatcctcttctcttacgggacttgccatcagcatcacctgtatcggagatgccgataaagacaaagtggtctaccgcaacggagccaaagacactgacttaatctgtgtcagcggtgacttgggcgctgcctatatgggtctgcaactcctggaacgtgagaaaacagtactgaagggtgaaaaagatatccaaccggacttcaccggcaaagaatacttactggaacgccagttgaaaccggaagcccgtaaagatatcatcgaaaaactggcggctgccaatattgtccccacatccatgatggacatctccgatggtctgtcgtccgaattaatgcatatctgcaaacaaagtaatacgggatgccgtgtctatgaggaacatattcctattgactatcagacggctgtcatggcagaagaattcaacatgaacctgaccacttgtgccatgaatggcggtgaagattatgaattgcttttcactgtccccatcgccgatcatgagaaagtatcacagatggagggaatccgcctcatcgggcatatcaccaaacccgaactcggttgcgcattgattacccgtgacggacaagaatttgaattgaaggctcagggatggaatccgctaaaagaagataaatagattttctcagttatatactgaaaaatatttcattccatacaacactgataataagcaaagtagctttttatcagtgttttttatttatagaagccttgcagaatccaaaactttaactacctttgcaaccgcaaaagagaaacaactgagttgaattagccttacggtgccatagctcagttggtagagcaaaggactgaaaatccttgtgtccccggttcgattcctggtggcaccactatcaactcagtaacaaaaatcccttgaacttcaaaagttcaagggatttttgttttatctcttttcttattcactctatcggtgtttaagtacacacatagcttccatcagcatacaaccggtcagatgcgatgtcaatcccacactctcatcatcagcaggtgcttttctccaacgaccgctatataacatagtcttctgattcactccttgctctgccataaccgtagcacaatgagttatgtagtcgcgaaacttattataattggcactatccagtgcagggtcattaatcagtttcacaaaataacggaagaagatgccatgaaacaagccaccgtcaccaccttctgcatcggagagtacaccttcattggtcgacaaatggtcaatcacaaaattggccgcttttactgcatctgccagatattgcttatcaccggttatcttatacagttcatgagctgctcccaggaaagtacccgagttgtacgaaaatacccatttggtaatcttgccttctccattcatgctgtcatacactgcccccgtctgacggtcgaacaagttattcttctcccatgtatatattttaatggcctcattcagataagcctgtttgggttttccggcctttttacccatagcatcgtaaaaattatacaaccgggcagcaataagggcagcaggaccattggaacaagcgttcttagattttgccacatccgtcttccaggtaatgccaccaaaccacggagcctcatcttccggtccccaagtagaccaaacccaatcatcgtaggtctgtctcgcctttttcagatacttggtattcttagtgctttcaaacatgcgaatctgtgccagagcaatccattccatatcgtctacaaacacattccaccacgggtcttcctctctgcccgcaaaattgaatttcggtgcaccttcccaccacaacgggtatatattcaaatactgtttgcttccggtacgcatatatgcatctaccatgacatccatagcatgtgcctgtggccaataatgattggtagtcatattggaaagatcactaccataattaaaataaaaccgattctcataccctttgaagtttgcgccccaaaaatgcttgataagggcttgcgacataccatctgccattttctgccaataaacaggcgtcttttccgccagacttgctgtagttttttctacaattacaggattgcttccccctgtctccgcagagagctgcaaagtcaagctgagaaaaaataccgtaatcaataagttcttcatgttttctgcgtttaaaagttaataatatttcagactcagcgggcaaaggtatgaaatagtagagataatgaatcattatttcttgccatttttgtacgatatgctgcattcttcttccggttaccctccgttcccctgtctgcctgcaatactatttttacgcataaaaaatcccttgaacctctgagactcaagggatttttattttatcatattacacttaagcaaatgaatatctaaaaataagtttcaatacttacattttttgttttaattctccaccggtttcttttcgagacagatattgaccgcattcattcctttcacaccacgttcaagatcgaatgttacaatattaccttccgagatattaccaacgacattattaacatggaaaaagtacttatcaactccggcaaggtcctttataaaaccaaagcctcttgcctcattaaagaattcaactctccctctcaatataacgggttcctcgtcttctttcttcggagttgcaatgattatctcatccaggtttatctcttcctttttgatattttcagccggaggagtcgaagttatcattccattctcgtccacataagcaatcatatcatcgaagctgcttttactggataacttcttgctatcctttttcttttgtttttcttctcgtttagcgagtctctttttttcattttcacgtttacctaccgtaatggattttgccatagaacttatatttaatttatactatattttaatgaataatgtaagggaatgaccttaaattgtaaaatcagccctatttagttttttgcctgtcaatttctgaatatcattaatctgtttgcgttcttcctgagagcagaatgtaagtgccatacctgcatttcctgctcttcccgtacgcccgattcgatgtacatatgtctcaggaacatcaggaagatcataattgataaccaacggcaactcattaatatcaattccccgggaagcgatatcagtggcaaccatcactcgcgttttacccgacttgaagttacccaatgcggactgccgcgccgcctgactcttatttccatgaatagcctggctgccaatgccggctttacccaatattttaactatcttatcagcattgtgcttggtacgcgaaaagataagtaccgaccggtcctccgatttttgcaaaattgaaatcagcaacaggctcttttctttcttctctacaaagtaaaccagttgctttatagaatctaccgttgatgatttcggtgtaacataaatcttcaacggattcttcagcaaggaattagtcagagcaataatcgtatcaggcattgtagccgaaaagaacaaagtttgcttttctttcggaagtttcggcaatattcgtttaatatcatgtataaagcccatatcaagcatacggtctgcttcgtccagaacaaaatactgaatattatccaatcgtatatgtccttgattcatcaaatcgagcaaacgccccggagtagcaaccagaatatcgattcctttatgcagcatatccacttgcggacgttgattcacgcctccgaagatgactccgtgacggatacgtgtatactttgaataatcttcaatacattcactgatttgcaatgcgagttcgcgggtaggagtcaaaatcagagctttgattcccgaacgcttgccttctcccttattgagatgcaaatgttgtataataggtattgcaaatgaagcagtctttccggttccagtctgcgcacagcctaaaatgtctttttttgccaatgctacaggaatcgctttctcctgaataggagtaggtactgtatatcctttttcttcaattgcttttaaaataggttcggttatatttaattctttaaatgtcataaatgttatttttgctgtttcagcacagcggttaattttatatatagtaagagagcacaacacattcaatactgaatatgcaaggtctccgatattaaaccagtttgtgagtcgctaagaaaaactcacgttccagtgtattcatcacttctttcacactgcttattttatctgcgagaaaggcgttgctaccggcaaaagcataaccttttttcatatttcctttggccgcattatacagcgctttaataatgcaataaggactttttgtatagtcacacgtcttaatgcaatggaatgagcatttcctcggcttttccagaccattattcacactatgaataaattctccgtcaatagcccgtcccggcattccgacaggactttcaataataagaacatcttcggatttggagtgaatatacacttctttgaaagtttccgaagcatcacattcaagggtcgtcacgaaaatacttcccatctgcactcccgaagctcccagttccataaagtgcgcaatatcttcccctgtcgaaattccaccggcggcaatcaccggaatatgtttctgttctttataactggccgcaatcgccaccacttcgggaatcaatacatccaaagcataattctggtcttgcagctgttctttcttaaaccccagatgccctccggctttgggaccttctaccactatcgcatccggcagatagttataattcttttgccatttgtcacagattattttggcagctcttgaagaagatacaataggtactaatttcgtaatactccccgtagtcaaataggaaggcaaatcaagtggaagtccggcaccggaaaatatcacatcaatcttttcattaatcgcagtacgcaccatatcagcataattcgataaggcaaccatgacattcacaccaataataccttttgttttcatgcgtgatttgcgaatctcttctttcaggccactgatgcatttttctgtataagtgcctttttctttgggataaagcaaccccagacctgcacacgatataactcccactcccccttcgtttgctactgctgacgccagaccggacaatgatatcccaactcccattccaccttgtataacaggtactttaatttcaatatttcctataaaaaatgatttcatatattttattctgtgcttggccatttcaaaatcaacacactccgaacatactctattcaagtattcaaagtcgccttcatcattggctgttcgcttgattggatattatttattaaactctcactcctgtttcttccaagagcattgtattacaaaaaagcctaataatctattgtcagaatggaaagtgcaggattatatactcctgatattgcgcataaaagaggcagaattagcagaacttaaatgtaaaatgatttttcgttttctccgtataacagaaattcctccgttgaatcatgaaacggtaatagtctgtataaaagcagaagacattatcttctgcttttatttattctgatattaatatcttcttgaattgttataaccacctccacggttaccaccgtatgacggtttttcagcgcgaggacgtgcaacgctcactgaaataaccttctggtcatattcaactccattcaattcgtcaatagctttttgtccttctgcatcattcgtcatttctacgaaagcgaatcctctggatctgccggtttctctatcaaaaataactttggctgaagaaacttctccatactctgcaaataaatttgtcaagtcagcatcatttgtgccataacttaaacctgaaatgtaaatgttcatctaaaattttattaaaaataaatactaatttggagtgaggaggataattacagaagaggactacttactaataatatattataaagaagaactacacaataatgattcgtgactcaaactctgggaacaaagataacacaattaattagataactatctttttattatttatttttcaagagatgttcaataattatcatttgttagcacgattattgtatggaaacaataagaataagcaaatctctactccttccttgataatatcacggattatatctacttttgtcatacttcaatcaaaaaaacagttccatacatgcgggaaatcaagctaacagatatcacacgggaagaattgtgggcaaagcaacgtttgtcctttaccgacatcgactatgccgtgtgggaacggaataaatccatgcttcatcaattctcgaagatgaaccggaactgtacatttgtagtagacgtatataaatgcagatatgcctatgcttctccgaactttgtagatttactgggatatgatgcccacaagatagcaacattggaaaggcagggtgattatctggaatcgcgcatccatcccgacgaccgcgagcaattgctcatcttacaaataaaattaagtcagtttatatacagtttgcctccggaacaacgaaatgactattctaatatttacagttttcgtgttctcaatgcgaggcaacaatacgtgcgtgttgtcagcaggcatcaggttctggagcagaccatcgatggaaaagcatggctggtaattgggaatatggatatctcacctgatcaacaagaggccgaaacggtagactgtactgtactcaatctgaaaaatggagagatgttctctccttctccgtcactgcagaccttcaatcctctcaccaaacgggaagctgaaattttacgcctgatccaaaaaggactgttaagtaaagaaatagcagacaaactgtgtgtcagcattcataccgtcaatattcaccgacagaatctattacggaaattaggagtacaaaattccattgaagccatccgaataggatatgagacggggatattaagctgattaaggcatccattccagcactcctcccaccggatgctcttttcgccattcttcaaacccggcataagtccgcactccatcccgtatgacagcctgataatattctacccccataatcttttcactttcgggtgtctcatttttcaattgaagaattgtccgcttaatctcatctgtcaagacggaagaaatacgttcggctactttctcaaaatacccatcgtatcgggaacctttccggatatgtatcatatcaatttgccagagtgcattatccgaatcctgataccaggcatgccattcaacacacgcctcaacagtatgcagcagattcacgcactctatcttcttcactgacgtgttttccgccagcttcgccatcgccctgaaactatcggctaaacttaaagaagacgtatatatatgaaaatcaatatcccggtgtttcatcagcaaccccatacgaagagaaccaaccagattaacctgtgcaccaatgctttcccatatcgggataacattgactttctctattatttcccatgctttctgctgatttcgtcttgcaacatcaaggatatccatctttcttctagattaaatgagcacgcaaaaataagaaaaaggcttgatatatagctataaataactatttaataccccaccggatctagctaactttgccaccctttcaatcaactttaatacccaaactgaatttatatatgatattcaacgaaacagaagagcaggaaaaagcatatttgcaacaggtgctcaatatcatcaatgatacgataaacagcacagacaagtctgttaaagagcacatagatactctgcaggaatacaaagattatctatggtccaataaagacatcgatcctcatgaaatccgttccatgcgtgaaagtatactgaatcattttgcacgaggcgaaaatgtgatagacaaacgcaatcgcctgagtaagatattggatattccttacttcggacgaatcgactttaaggaaaatggaagcagcggcaaaaagcttcctgtatatataggtatacacacattctacgatttcaaaaacaaaagaaatctgatatatgattggcggtcacctatttcgggtatgttttatgactatgagtcaggtgaggccacttattcttctccgtcaggtgaagtgcatggagagatttcactcaagcgtcagtaccgcattcgcaaaggtaagatggaatatatgattgaaagttccgtcactgttcatgatgatatcctgcaaaaagagctctgttccaatgcagacgacaagatgaaaaacatcgttatgaccatccaacgcgaacaaaaccggattatccgcaacgaagatacgcccgtactcatcatacagggagtcgccggctcgggaaaaacgtctattgccttacaccgtattgcttacctgctctatgcacaaaaaggaaaaatttcatccaaagacattctgatcatctcacctaataaagtatttgccgattacatatccaatgtccttccggaacttggtgaaacgactgtaccggaaaccagcatggaacagattctctccaccgtccttgacaacaaatataagtttcagaatttcttcggacaagtctcggaactactggaaaagccggctccggattttatcgaacggatacaatacaaagcttctttcgaatttgtttcccgactcgacaaattcatcctccatatggaaaatcactatttcagagcgactgatgtaaaactcaccaagtatatcactattcccgcagaattcgtaggggaacagttcaaacgattccatcgttaccccatacgccaacgatttgaaaccatggcagattacattctggaaatgatgaaaatccagtataaccttacagtgactaccgctgagaaaaacctgctgagaaaagaaattaagaatatgttttcaggaaataacgacctccagatctataaagactttttcgaatgggccggaaaacctgaaatgttcaagatgcgaaagaatcgtatgctggaatatgcagatatggcccccctggcttatttacatctcgcattggatggaaataaaactcaaactcatatcagacatcttctgatagatgaaatgcaggactattctcccatacaatacaaagtgatccaaaaactttatccctgccggaaaacaattcttggagatgcttctcaatctgtcaatccctatggctcttcaactgctgccatgattcaaaaagcttttaccaccggagaagtaatgaaactatgtaagagttaccgctctacttttgaaattaccagtctggcgcagaaaattcaggcaaacaatgaactggaacccattatgcgacatggagaacaacctgaaatttttccattcaagaatgcagaagaagaaacgacaggcattgttaatttggtatcggacttcagaaactccggatatacatctttgggaataatctgtaaaacagaaactcaggcaaaagcgcttgctcagaaactccaagtccatacagataacatatcgtttttgtcaagtctaagttcagcttatacaaaaggcattgttgtcacttccgcacacatggcaaaagggttggaatttgatgaagtgatcgttccacaagctgataatcagaattatcattccaccatagataaaagtatgctttatgtggcggtgacaagggcgatgcataaaatcacattgacctatagcgggatacccaatcggttcatcgaataattcccatcaagatggtggttatttgcccgtttaccgcttctttgcatatagtataccctggcttaacctgtttatcaactaaagtttgtgtattatctaactgacatcttcatcgttccacccgggtgaacagtctctatcacctaggtgaataagccagttcattattgtgcaatgatctgttcacccgggtggaacgatgaagatgtaggttagataacagaataagatatataggataacatctaggatacagtgacttaacatacaaacaactgctggttttaaacagatatagcggaccacatcttatgtacttactttgatgtgagagatagcaatgagagataaccgaaaactagtggttttgatggaaaaacaatgagagatacctgttcggaaaggtatctctcattcattatattaatgattgtcagcatactagatattccacagtgagaccgtgagactaaaattattttttttctttctagaagagtctttttccaataatgacaaaggattcattgtaacaggcaaaagcagcacataccgctttgatgatattggggaactgccctctatgaatatgacaatgatgcatatggaatcacaatgataaaaaataatgtgtcaatgcagtcatcattaaaaaaaggcactactccttatttcaaatccgagagattttcactacattcacagcatgaaatacagaattatacttggactatcagccattctcttttttacaggatgttataatagagaacatatttcccggcttgacgaggcggaagctctgttacaaaacaagccggacagtgccttgacaatattaaagcagctcagacaggaaggcagtcaggccgaacaggccagatatgccttgctttactcggaagcattagataaaaaccatattaaagtaacggatgattcactgattcgccaggcttggagccattataaacactattccaaagatttacgacaccaatgtaagactctctattattggggacgaattaaactacgggcaggagacaaaccgggagcattgcgcctttttctcaaaatagaagagaaactgaaagacaccaatgaaccttattatacaggactgttatacgggcaaatcggtgaagtatattatgaacagatgaactacagccgggcttatcattatttccgtgaagcccgcaataacttccggcagtcggataatgtacgtgaagaaacggagtcaacacttgatatggcagccgcagcttttcattcgaaagacatagagaaagcaatgcgtctctacgccgccgctcttgatctggccgacgaacaaaagaacgatcacctggcaaaagccagcctcacgaaccttgcctctctttatgtagtatcgggcaagcggcaaattcctcatgacttgctgcaacgcatcgagctttccgcccgacaggataccctgtacggctaccatacactggtagatgtgaaccttctgaaaaatcgtatagacagcgcacgctactatctggctctcgcagaagcacagactaccgacatccgcgacttggccgacctgcaatataccgcatatcgtattgaagcacaaaccaggaactttgagaaagcaaccgataacatacatcgttatatctatctgactgattcgctgacacgctcaaacatgcagttttccgccggcatggtggaacgcgaatattttaaagaacggactgactttgccgaataccggatgaaaaaccgtactacctgggaaatcgcagcagcaactgtaatccttctgatgataggagtggcttattacatcacccgccaacgcctgcgactgcaacgcgaacgcaccgaccgctatctgctactggcagaagaagctaattccgagtataaaactctgaccgaacgcatggaaggacagcgcaatactgaaaaccatctaaaaggattgatagcctctcgttttgacattatcgacaaattgggaaaaacttactacgaacgcgagaataccgcatcacaacaggccgccatgttccacgaagtgaaacaaataatcaccgattttgcagaaaacaatgaaatgctgcaagaactggagcttatcgtaaatacctgccatgacaacgccatgcaaaaactccggaatgatttccctgcaatgaaagaagctgacattcggttactctgctatatctttgtaggtttttcaccacaagtaataagcctgttcatgaaagatacggtagccaatgtatatgcccggaagtcacgacttaaatcacgtatcaaatcagcagagactgctaacaaggacctgtttttatcacttttcggataggtgttaggccagtgttagaaatctgagaacccattcaaaataactatctgaatatcaacactattaaaacaccagtgttagatttacaagatcgtaccataactcaaaaatgatacgatcttactacttttgcattcgaaaaaattgaaaaaagagaagattatgagaaagattgttattctgctaggtatcatactttttatgatagcgtgcgaaaaaggaaacgaagaagtgagagaagctaaagtagtggttgtcgtttatgatgaaaatgaaaaaattgcaacgggtattcccgtaaagatgtataatgaaaaagattataaagtttttgagaaagataatctgaccttacctactgcggttgcccgaaccaatgaaagcgggatagccacctttattttaccgcaagaagaatggttcgcagcacagtcgcagcggttctttacgttcgtggtacaagaaggtggcggacctgataactaccagatatggtcttccggcagaaccgtagaaacaggtaaagtagtgaaaatagaaatacgtttaacccaattccctaactaagcttttatcacaatgaaacaaactaaacttaatatattaatagtactttgcctgcaaatgatagcaggacttacattactgagttgcagcactgaaaacgatgaattcaagaaggaactgcctccgacggagcaaccatctgaacccacaggagccttacttgaacgtttttccatagaccagctgcctgcaaaaacgatttatgcattaggagagagtatagacttaactggactcaaagtgacaggtgaatatgatgatgggaaacaacggtccgtgaatgttgccccaaaacagatcagtggtttctcgtcatctgtccctgtcgacaaacaggaagtgaccataacaatagaaggaaagcagaaaagctttactattcaggtggcgcctgtccgtgtggaaaacggagttctgacagaagtcctgaaagggtacgatgaaatcatactccccaacagcgtgaaatccattcctaaaaacgctttcaacggcagtaaaataaacaaggtgacactcaatgagggactgaaatccatcggagatatggctttcttcaattcaactattcaggaagttatatttccctcgactctggaacagcttgaggaaaacatattctactattgctatcaccttaaaaaagcagatttaagccggactaaactcactaaacttcccgcaagcacctttgtatatgcgggcgttgaagaagtgttattacctgctacgttgacagaaatcgatgcacaggcattcctcaagacgtctcaactgaaaacgattgagattccggagaacgtcagaacaatcgggctggaagcattccgggaaagtagcattacaaccgtgaagttaccgaatggtgttacaaacatagcgcaaagagccttttattactgtccggaattaacggaagtggcaacctacggaactgttttcaatgatgatcccgaagctatgattcacccttactgtctggaaggatgcccccaattaacacgtttcgaaattccacaaagtatccggatattgggacaaggattattgggcggtaacagaaaagtcactcaactgaccattccggcaaatgtgacacagattaatttttcagcattcaataacacaggtatcaaagaagtcaaggtagaagggataacacctccacaagtatttgaaaagatatggtacggatttccggatgatattactgtcattcgtgttcccgccgaatctgtagagaaatataaaaccgcagccggttggcaagactacacaaacaaaatacaagcgtcctgatgatttatctgaattttcggttatcattgtaaaagtcgattccacatctgctttttatgatgataatcggaaattcttttttattcggtttctgtcagatatattcagtaaatattccgctatatattcttctttactcccaaatactgttctattttccagttttattctttatctttgacgcaataaaactacttcgaattcacaaatatagaaaacggcaagaggatgccagacatatagttatgactatactaattattatagctgtagtagtagtgattttcatcgctatttacaactcactggtgcgaaaaagaaatgagacggaaaatgctttcgcagccatcgacgtaatgctgaaaaagagatacgacttgattcctaatctggtaactacagtcaaagaatatgcagaacatgaaaaaagcacattcgcacagattacggaaatgcgcaacaagtcgtacgcatctttctctaatcaggataaagaaaatctggactctgctttctcacaagcctgtacacacttttttgccattgcagaaaactatccgcaactgaaagcgtctgaaaacttcgaacagttacaacgtgcacttaacgaaactgaagagcagctttcggcagcacgccgaacttttaacgcttgcgtcactgactataataatgcagtacagactttcccgtcaaatctgttggccggtatgtttggtttcacccgcaaaagcgtattctccatttccgaacaggaacgtactgttccgaatgtgaataacttgttgaatcagtaaaaaacaatatataatatggcagaaagtccgcaatttgagacattggtacaaagtctttcctctactctgcaaagtcttgaacagaaacgcaaagaactaaaaaagcaaggacattccaccggaatatgggtaggagggattattctcgtgattggtattgcattttccctttatgcccatgtagcacttattggaatcggtattgcggcaggtcttgctttgttggcatactacagttgtataaatgccaaatcgcaggagttatccacctattataaacaggaagtaatcgcacaaatattacaatctttttgtgaaaatgccgtcttcacacccgaagagggaatcaaggaaagtacattcaggaactgtgccctattcacttctcccgaccgttatcacacagaagatctgatacagggacgtgtaggaaaaacggacttctgctgtgcggaaattcatgccgaagaacgaaaaacacgtgtcaattcaaaaggacagacaagtcattattgggtagatatctttaaaggtttctttttcattgccgattttcagaaagactttcagggacataccactattttaaggaatagcctgttcaaactaagttccagcggttcgcgggtgaaactggaaaatccggatttcgagaaaacattcgatgtttactctacagaccagattgaagcacgctaccttctttctccttcaatgatggaacgacttcttgcactagacagagaattcaataagaacatcacaattagtttcagagattcaaatatcctgatagctattcctgaatcaagaaatcattttgaagccagcatctggaaaccgatggatgaccttagccagctcaaaaacgatttcagcatgattcatgcattggtctctattgtagaggacttgaatcttaatacacgaatctggagcaaaaaataaaacgaatcagcagaaacagaacccgttttatatgtcggacttaatagaggtttgattgatacttctatagagtttctgcaactcaaatctccccgttgactcctaatccaaataaagcaaaatcacccaggcaaggatcatccggaaaaacttcagccaatgcagcggtgatccgacgggcattcttcaaagaaaaagtttccgtatccgtcaacttgaagtaataagctaccctacagacatgagtatctaacggaacaatcaggtctttacgatcaaaactctcccaaacacccaaatcaacctccgaatcccgacgaatcatccaacgtaaaaacatattcagtttcttttgaggacttttggcagaaacttcgagaaatgcacataacttctccataggtattccggaatatatattcaaagcatcttccaaacttccgaactgcgtataggccgtatataaccgacggaagtatccatgaaaatcagcatacgacagcatccgataaaaactatgggttgccccggaaggaaaatcttcctcccaccggcgggataatacatattgataaggtgaagttcccattagcttatgcaactcatccgctttcttcaatatctgcttgcgattgccaaaactcataattgccgtcagcagtccgctaatctctatatcttgtttcagcgtataacgatgagggaactgcaccggatcacttgcgataaagcctgcacaatggtacacctctgcacacatcaaaagtttattctttatatcttcagtcatttcgagaaagtatcaatcattgaaagtacaaaagtacatattctgtttggatttcctcttcaagtacagaatggattgtattcccaatagaataacgaacagatattccgctgtcatatacaccgtcaaagaggcatgaaaacactcactcagcaaatatagataaatcagatagatcaggatagtaaccagttgaaagacaaaggcaagtcttgtctttcccgtacctgtaacagcattgatataaacatatccgggcaatgcaaacacataattcaacaacatgactataaaaggccagaaagcaagttttactaaataatcgttatttgtataaaatccgatgatccattgattgccccaaagagctgtcagtatcaatggaagccctaccacatagcctaatctgagaactttgcggcaaacgggaaaaagttccttcccctgtcctcccccgatcagattgctaactaacgatccggtagtagaagcgaaagaattgactatcacaaaaaagagggtagacacacttcgggtaatattggaaatagcaagttctgtcttccccaaatgttcaatagccacaaaaaacaaaaaccagggagcgacactgataaaagcatgaagcatactccatacggacagttgcagtagtttcatcagcaatctgccatcatagacggcactcagaccatattttttcttatctaccgttttacacatatataacaagagtatgagaaacgctccaaactcagcaatggaggaggccatcgctgctccggatatgcccatatctagtttgaatatcagtaaatagttgaaaggaatattgatacagactgccgtaagagctgctccggagaggagtttagtattcgtgaccccaaccaggaaagcccggaaagctaagaaaggaaacgaaaataacaatccgaaactacgccagtccagataacggatcacagcctgataaatttcatcagaagtaatcagctgttgcagaataaacggagaaacaagatgtatcagcagacaaagcatgattgccatcaccatcagaaaatataatccctgaaagaaggtgcgccctgtttctttgtaatgctgctccccatttcttcgggcaatcataacctgcagaccaatgctgaatccaaatcccagcatataaatcgctaaataatatattcccgcaagtgcggatgatcccaattcgatttctcctacgtgtcctaaaaagacagcatcggtaatgttgattaattgctccatcagaatgctcatcatcacaggaaagttgatgagccatatttgcttatatgtatatttcattgctcaactaaaaatagcacgatacagcatactacactcatagcagtacacagtttcgtaaattcataaaaatgggtataaaaactctttggcaagcgggtcgttgcttaccggatagctgaatagcctgatttagaaaggatgctattcgttgagcgtagctatatgcagagtttcataaataatggatatactgtcagttcattaatcacgctacaaagatagtcatttttatttcatctcctaatatggtatggtattagcagattacatctaggaatggactgctacagaagcaggaataatggaattaataatttgattctgaacaacatacctgataatcaaatagcagatcgatggtaacagaccatctctatttgaaaaaaggcatatcattttgaaaaagatcagtaaccaataaattatcagataacaatgaaagtttgcaaatttgaaaaaatgaaagaagaggatgaaatcagacaagtaatcaattacatcctaaaggaacatccttacgtagttgtggttccgacactgacgcaactacaagaatggctgcaggatatttctatcagctggtttcatgaagaagacagtgcttcgcatacaacaatcaataatatcgaagaatattgccgtacactggcagatcacctcataacagatttgccactaaatacagatataaagaaatatatccgggaatgtatcgaaaagatgcacaaactggtggaggacaaagccgatttattaattgataaaataataaaagccgaaatataccggttatccggagaattgtttgcctgctgcctgcgtcagtatggactgaatgcccgcacattggataccggtacttttatgcaaatgaatctggaaaggaaaccggatatcccctacattcaggaatctatctggcagtatatcaatgagaatcgggatactgacattttcatcgctcccctttccttatgcaaaaatgtatatggcgaaattgatttcatgaatgagaagcgtaatgattattatgctaccgtactcgccagcatattcgaagcagacgaaatcattctgtcaaccgaactcacaaatatctataccaaccggaactgtgccagggaacaacattctctgacctacaccgaagccgaacagttgattaacagtggagtacacttaatttatacagactgtatcactcttgcagcccgttccaatatcgttatccgcttaatagacacccatgatctggaaacagaacggctctacatctcttcccatgatacggaaagcagtgttaaagccattattgtccaagactcagtgacgtttgtacgcttcacgtcattgaacgtcctgcccggctatttactcatgggcaaattactggaagtcattaataaatatcagataaacgttatctcaatggcctcatccaatgtttctgtctccatgattctgacagccagtcgtgataccctgcgaataattcaaagagaactgcacaaatacacagaaatggtcgttgacgaaaatatgtccgtaatacatatcataggatcacttcattgggaacgtacacaactggaaagtaacatcatggaaacaatcaggcatatccccatatcactgatttcttatggcggcagcgatcattgtttcacaatatcagttcacacggctgataagaagcaattactcaattcgctgtcacagcgttttcttgaaagactttcagcctgattaacaaagtaataaatacaaatccataaaaacatgaaaattacaattataggagccggaaacatagggagcgcagttgctgcctgtctgacaaaaggacatctctacaacgaaaaagatattatcatttcgacccctcatacagacaagctagaaaatctgcacaaacaatttcctgcgatacgcataatgacagagaatcagtatgccatatcggaagccgacattattattctggctgtcaaaccatgtatagtagacgaagtattatctccgttacgattctcacgcacccaaatcctggtttcactggtaaccggaatatccatttctcacctggcacatttatcggaaaccgaaatgcctatattccgggttgttccaaacatcgccattacggaacattcgagcctgaccctgataacttcacgcaaagccggcaaagaacaccagcaactcataaaacagacattcgaagaaggaggaaagtgtttgttcgcagaagagaaacagctggatatcatttctgcattaacttccagtggaatcgctttcgcattaaaatatattcatgcagccatgcaagccggcatagaattgggtatctccgctgaagatgcaatgcgaatgacggcatatagcatggaaggagctacagaactgattttaaatcacgacacccacccgctgttagaaatagaaaaagcagccactcccggtggagccgccattaaaggattgaatgaactggagcacaggggatttacttccgccgttattcatgccataaaaagtagcgccacagtatcgaccgataaagagactgaagaatagacaaacgatcccctaaattttcacgcacataatttcgcactaatataaagtatatatttttcatataaagaagaagatactaacagcattattatacgtttattatacattaaaaagagttaccctatacacagagtaactctttctaaattcagttcttcaggttcagatttaacttacgatactttatatcgacaattctttacttataagttaatggaacttcaaagatgttcacgaacagcattctttattatccaaagctaaaagggaaagtgctttcaccagataaagcaattaatccatttttccgctggatacaaattttgttctctctcgccagccaaccggcggctaatgctgtactctctacgctaaggtttaatcttctcgccaattctggtatcgaaatttcaccaatttctttcagggcaccccagaccttgccggcattattccctactactcttttatccatggctattctctattaataattcgaaactaagatagcgattttaataatagttcacaacatattaccttgttttatttaacagattgacattatttaaagattcaaaaaagaatcgggttcaaacagttaaatattcggtcatgttttatactaaagcaccattctggaatactcaaaatcatcaaataaattcatagcataactagaagagaatcaacaggttttattaaaaaaaatgaataatagcaatatcggacaagttcgttcccttttttaccaatacctttgcgaagtgaaataccaaaagaagttatgcaacagaagaaaacaaccaaagaagagtatcaaaagtgcgtaaatgttgtggtggaatatatcaatcaacatttaggagaagacattgatttgaaatcgctggccaggatatcaaacttttctcctttttattttcaccggattatgaaagcattcctcggtgaaccgatcggtacctttattgtccggacgcggacagaagcagccgcacgtttattgcgctattcggatattccaattgccgatattgcctatcgcatcggatattcatccccttcttctttgtcgaaagtgttcagacagttttatggtatttctcctttagagtatcgaaacaataaaaactttgtaattatgaaaccagcgattatcagaccagacctggaactgaaaagtgaaattaagagtatacctgcacgcaatgttatttatatccgcttgtccggtgactacaaactgaatgactacggtgggacatggggacgtctgtggcagttcatcaaagaacaaaaactgccaatgggagatttcagcccgctctgcatctatcacgacgaccccaaagtgacaccagccgagaaattgcgcaccgatgtatgtatggtgatgcccgtacaggtagctcccaaaggagatgtaggattcaagacacttccggcaggacgttatgcaatcttcttatataaaggtccgtatgacaatctgcaagcggtatatgatactatctatggaaaatgtctgcccgaaatggaatgtacgctacgcgatgaacccagtgccgaacgctatctgaacaatccgtgcgaaaccgctcccgaagaactgttgacagaaatttatattccggtagaataagaaggatttaaaaataaatgagactgcatatctttaggaatgcagtctcattctactttcgctcatcattacccatcagagggcaactacgccggacagataatcttcctctcttttacctgttatttatcagcgtaaagccctaccctgtttccctcgctatccgcaaacaaggcaaaccagcctctgccctctacttcgattttcgtcttgggcatcatgatttttccacctttccgaaggactttttccagtgtctgatcgatgtcttcacaattaaaagagataatcactcctttttccgaaggaagataatcgggagcatgaaaaatagctccgaccgtttcaccttcttccgtgaaacacgccatcttctcctcttcacattcaaaaaccggaagctgtaccccaaacactgtttcataaaaatcgacagcccggtgaaaatcaactgtaggaatctcaaaaaatgcaataaactttttcatttcgttctttttttatggttactattgagcctttgcaaagacactgcaaaagtaagggatgccacaaagctctgataggaaaaaaaagacattttcaaaattccgagaagtaatcggaataaggagcacaaacagaaagatattctgcaggcgtataaccggaaaatagtttgaattccttgatcatgtgggactgatcggagtatccacattcataggccacttgtacaaaaggcaaagtcacatcctgttgcaacagaaataaagcacgttgcatacgcacaatacgaagatattccttgggagtcgtaccgacatgatcggcaaaaacacgtccgaactgcttgctactcaaacaagccgcctccgacaattgaggaatatttatctgtggttgaagattgatttcctgaaagacagcagacatcctcttcagattatactcggaaaaagcatataaacgacgaagaaaaaactgctctatcagacgaatacagactatattatcagaagtatcagtgacttgcttcgccaaatccgatagttcgacatcttccacttcatccatcgctacatctttcccatgaaacaagtgaacgggaatgtggagcaaggctttcgctgcataaggttgaaaaacaaccgtaatcatctctatcctacccgtcgacaacacatcggagaatccgatcgactgtccgcaaataaaagactgtggctgcaactttaaatcattctgcaggaagagctgtttccctttatgaaaaacaagctgcatacaaccgatggggaaagtccgttcggaaacagaaactgctgcatcatcctgcaatatccaataatggcggatgtaaggcgatagcacaggaacgggctttataatctgaaatgactgcatatggcaaagatatcacttttttaattatggaagcaaaagtagagagtctctttgaatctgtattgtaaaaaagagacattctgacaaaaaagaagctgccccattatagaatcacgagacagccctaccaaaaaccgtatttattttcaaataacagaaagcccgtattcataggcttctgacatcgcctgatattctttgtccgaatatgcgcctttacttcttgccttctgcatatcattcataaaggacttaacggtagagaggaaactctgaaaattcttcagttcttcatcataaccggtaacagccggaattttttccgcagccttcagttccttctccagttccgccattttcaaatcaatccgcattccgtccattgcatgtttgcgggaatacaaattcattatgctctgcaccgtgcctgacatcttgcgcatcgccattatctgatctttcaaaggctcatcagccaaaagttcactctccgcttgttcggtcaaaggacttagaatatcaaaaatcacttgcttatactcggacagttctacgctcaacttatagttttcattcagaagctgagccgtttttgctgtatctttcgacttcttataagcaagaaatttattgaagttatcatagaactgtgtccgcacattaaacaatccggcataattctgctttagattctgacggacttccggattaaaatagtctcccggatccaataattccgctgtatcacgcgcagctatttccggaggtgcaatcggttcaacttcaggcactttcccagtttgttccatgtatcccaacactgcgtttatatctttcgcattagccacatgcctcaatacagcaagtgatatatgataataattgatcaccttactggcattatccaattcctccgtactttccgaggatacagtctgctttttacttccccccgaacaggaagacaacagcaaagcaccgaccagtgctccaaacaataaaaatttctttttcataatgttctccttattagttacttttcgtactataacaataaaagacgatttttgttatgtacaaataataggtatcacatacacttacagcggtggaataattcaagatgctattaacgatgattaaagaataaacaattatcgacgtataaaaacaaaaaatggctactcatcacgagcaaccaatcttttgttaaccttaaatctaatacttatgaaaaaaacacagtacaaatataccacctttcaagtaaatagcaaatttcagagccgaatcggacgataatataacacggtttaatattctcggaagcgcattaacatttcagacttttcatgttaacatttaacatattcattcacagttcctgcttaaagagattcttgaaaaagcaactaagtccgctttttcctctcatctcttattaaacctttatcagtatgctctattctcccatccatccgttctattgattatttttcatcacggaattattgcaatacaaccaattttaccgtaactttgaaatatgataattagcgccagccgccggacagatattccggcattctattcgcaatggttcttcaaccggattaaagaaggatacgtgttagttcccaatccttttaatcctaaaatgatcagcaaggtcagcttacatcctgctgtggtagattgcatcgtgttctggaccaagaatcctgctccgatgattgataaactggatcatctgcaagactacaaatactactttcagttcaccctcaatccttacggagagaaattagaaaataatctgccgtctatcgacaaacgaatagacatattcaaacgcctttcggataaaataggaaaagagaaagtgatctggcgctatgacccgatactgactaacgaggaatatgacgtttctttccataaggaggcattcgcccaaattgcctacggacttaaagaccataccgaaaagtgtatgctgggatttattgaccattaccagcatatccgcaccgcagtcggccagttcaacatacagccgttgcgaaaagaggagattgaagaaatagccgtctctttcaggaataccatcaacgaatatcctgctatccaactggatacctgcacctccaaagttgatctgagacatttgggaatccctgccggactgtgtatcgacaaagaactgatcgaaagaatcaccggctaccccctccttgccaaaaaagacaaaaatcagcggaatgtctgcaattgcattgaaagtatcgacataggcacttatgaaagttgcctcaacggatgcatctattgttacgccatcaaaggcaattacaacagtgtggaatataacactaagaaacatgacaggaattcgcctttactgatcgggcatccggcagaagatgatgtagtgaaggaacgggaaatgaaaagtctgcgaaacaatcaatattcattattctgaatcacgcccggactccaaataattccttcgcataagagcaaaaaaaaggctatctatcccagacagccaatctttgttaaccttaaatctaatactatgaaaaacacagtacaaagatacggacttttgcctcatctccaaattttccggctaaaacgggatatcttataacatggtttaatagaatcagaaccgcattaacaaataagcaacttcatgttaacatttagcagtcttcttaaatatttaacccataaaactggatgagatgcaaaagttttcgaatctgttgccgattcctattaataagagtttacaggcaacaacaaatccattcattagctgttaattagaggaaggtaatcatcaaattctcaacatatatgaaaagatttgaaaacaaagtagtcgtcatcaccggtgctgccggtggcattggcgaagcaaccacacgccgcatcgtctccgaaggaggaaaagtagtcatcgccgatcattcgcaggaaagggccgacaagcttgccgccgaactcactcaagcaggggccgacgtgcgtcccatctatttctccgctaccgaactccaaagctgtaaagaactggttgatttcgccatgaaggaatacggtcagatagacgtacttataaacaacgtaggcggaaccgaccccaaacgtgatctgaatattgaaaagctggatatcgattacttcgacgaagtattccatctgaacctttgctgcacgatgtatctttctcagcaggtcattcccatcatgaccactcacggaggcggaaatatcgtaaacgtagcatctataagcggactgacagccgacgccaatggcactctctacggagccagcaaagcaggtgtcatcaatctgactaaatatatcgccacccaaatgggaaagaaaaatatccgctgcaatgccgtagcaccgggactggttcttacccctgccgcactggacaatctgaacgaagaagtacgcaacatatttctgggacagtgcgccacgccttatttgggagaacccgaagacgttgccgccaccattgcattcctggcctccaacgatgcacgatacatcactggacagacgattgtggtagacggcggcttaaccattcacaatcctaccgttgaattatcataaatataccccggacagtacatcctgctttttatcataagaacgattggctatcaaaaagtatcttactctttgctaataaagccagatgtactgtccatttattctctttttcatcccctctctttcaacatactccaaaacagttcttcatgacgcgaccaaagaaacttactccctatctggaatgcaacattggtggctcattggcggctgccaaagaaaccaatggcggattttatctttccccgtctgtaggagcacaagtaaagctcactcaaaaattaaaaatgaatattgccttaagctatgaaatacagcaactggaaacgctgaaacagcggaccgatgaatatttccataccgaattcaaggaagaactgtctcaccactccatcaccctaaaagtgggattaacttactaaagaaggaattattgccaattaatcagtaggattgtccaacaaatgctaactttacgacgttttacatataaagaataaacggtatgattgtaagaacactgctggatacagacctctataagtttaccacctcgtacgcttatatcaaattattcccttacgcaatgggtactttcagcttcaatgacagaaacgaaactgaatataccgaagaatttctggaagcgctcaaaagcgaattcagcaacctcagccggttgaggcttacggaagaggaactggaatacatgacacgcaattgccggtttcttccgagagtctattgggaatggctgtcttctttccgttttgatccggacaagatcgatattcatctggacacaacgggccggctgcatattgaagtcagcgattttctttataaagtcacactgtatgaagtaccgctgcttgccatcgtatccgaaatcaaaaacaagtttttcggcaacatacccgatatgagcgagatactctgcaaattgtcggagaaagtggaattgtccaatcagcatcagctccgcttctcggagttcggcacgcggagaagattctcaatcgacgtgcaggagacggtgatcaaacgtctgaatgatacggccaaatactgtaccggaacttccaattgctactttgccatgaagtacggcatgaaaatgatgggaactcatccgcatgagtggttcatgtttcatggggcacagttcggatataagcacgccaactatatggcgctcgaaaactgggtaaatgtatacgacggagatttgggcattgcgctgtccgacacttatacttcaggaatattcctgagcaatctcagccgcaagcaggccaagctattcgacggagtacgctgcgattctggcaatgaatttgattttattgataaactggtagcccgctataaagaactgggcattgatgccactaccaaaacaatcgtctttagcaacgctctcgacttcacgaaggcactggaaattcaggaatactgcaaggagaagattcgctgttccttcggaatcggtaccaatctaacgaatgacacaggatttgccccttccaacattgtcatgaaactcacgcaatgcaaaatgaatgtcaatcaggaatggagagaatgcatcaaactatcggatgacgagggaaaacatacaggcagtccggaggaagtacaggcttgtctgtacgaactaaggctggcgaaataaagaccgctctgaacagaaagccggggtacgggcataaaaaaaggagcaacgccttgctccaacctttgttaaccttaaatctaatactatgaaaaacacagtgcaaagatacgtacttctgtgttattagcaaattatccaaataaaaaagtatgttttataacacgatttaaaactttcatagaaaaacatccctttttattaatactttttcaagatttaaactctttgaccgctcttcccaatctttccagcgtcagttcaccggattgtctccagagctgttcaccttttctgaaaagaatgaatgtgggagtggattcaatggtatagaaattagcgagatcactttcctcgtctacgtccacctgtactacctcgactatcccttccatctctttcttgaactcttttatcaaaggctgcatacgctggcagtgaggacaccacgttgcataaaattctgccattacccagtcatcacccgccagtttctctctgtttctcgtatcacgagctattttcttttctttcatatcgattctccttttaattaattagtgggagtcttaacaatacaaaaagaggaaggtttaacgcataaacattaatacacagagatttagttctattggaaaagtaaaggagaggaaatatctgccggagtattcattgcacaaaactgaaactttcgtgcaaaaacagaacacagtattcaatatttatttatctttgccccccgaaatggttcggagtccgtgtccaacggatgacgattaaaagggaatcgggtgtaaatcccgtacagtcccgctgctgtgaagctctatacaatgtcttattaatgaactaatttatcgccactgatgttattttgggaaggcactataagacaagagtcagtcagaagacctgccacttcgcgtaaagcgttcttctgcctcgtgggttaggagaaagaacatcatttgttaagccccaaatcaagaaaatactgtgtttctgtcggatggactatgtctgtgaagatgggaaggcattaaataagtatgtacttaattgagtaaagtatgataaaaaaaatcttagtagccaatcgcggtgaaattgccataagggtgatgcgctcctgccgggagatggagataacgagtatcgcaattttctccgaagcagaccggaccgcgaagcacgtgctctatgcagacgaagcttattgcgtaggaccggcagcatccaaagagagttatctgaatatagaaaaaatcatcgaagtggcaaaggaatgccatgctgacgctattcatccgggatatggtttcctgtccgaaaacgcgactttcgcccgacgctgtcaggaagaaaatattatttttatcggaccggcccccgaaacgatggaggcaatgggcgacaagatatccgcccgtattaaaatgatcgaggcaggggtccctgtcgttcccggcacacaggagaatctgaaaagtgtggaagaagccgtagaactctgcaacaagatcggttatccggtgatgctgaaagcatctatgggcggcggcggaaaaggtatgcgccttatccacagtgcggaagaggtggaagaggcttatacaactgccaagagcgagtcactttcttcttttggcgacgataccgtttacctggagaagttcgtggaggaacctcatcacattgaatttcagattctgggtgacaaacacggaaacgtgattcacctgtgcgaacgcgaatgttccgtacagcgccgcaaccagaagattgtggaagagacgccatcggttttcgtgactcccgaactgcgtaaagatatgggtgaaaaggcggtagccgcggccaaagcggtcaactatatcggtgcaggcacgattgagttcttggtcgacaagcatcgcaattattacttcctcgaaatgaacacccgtctgcaagtagaacatccgataacggaagaagtggtcggagtggacttggtgaaagagcagatcaaagttgccgacggacaagtgctccagctgaaacagaaagatatccaacaacgcggccatgccatcgaatgccgtatttgtgccgaagacacggaaatgaacttcatgccgagcccgggaatcatcaagcagattacagaaccgaacggaatcggtgttcgtatcgacagttacgtttacgaaggatatgaaatcccgatctattatgacccgatgatcggcaaactgatcgtatgggctactaaccgcgaatatgccatcgaacggatgcgccgcgtactccatgagtataaactgacaggggtaaagaacaacatcagctacctgcgtgccatcatggacactccggactttgtggaaggccattacgacacaggctttatcaccaagaacggcgagcatctgcaacaatgcatcatgcgcaccagcgaacgtgccgaaaacattgccatgattgctgcctacatggattatctgatgaatcttgaagaaaacagaggtgacgcaacggacaaccgtcccatcagcaaatggaaagaattcggtttgcacaaaggtgtacttcgtatctaaactaaaaacagcattcaattatggaaattcatataggagaccgcgtagcggaaatagagctcgtcagcaaggaagacaataaagtggtacttaccattgacggaaaaccgtttgaagcagatgttgtgatggccgaaaatggcacctgcaatattctgatggacggtcgcagcgcaaacgcacaactgattcgccgcgaaaacggtaaaagctataaggtaaatacgcattatagcagtttcaatgttgaaatcgtggacagccaggcaaagtatctgcgtatgcgcaagaaaggcgaagacgaacagaacgaccgcatcacttccccaatgccgggaaaggtggtgaaaatccctgttacggcaggacaggaaatgaaaacgggagataccgtcatcgtcatcgaagccatgaaaatgcagagcaactacaaagtgacttcagattgccgcatcaaggaaattctggttcaggaaggcgacaacatcaccggtgaccagacattaataacattagagccgattgtataatactaaaaacggattgcatcatggaagaaataaataaagcatacgccacgttccaggaacgtgaccgcatcgcttccctcggtgggggcgtggaaaagattgaaaagcaacacgaaagcggaaagatgactgcccgcgaacgcatcgaaatgctgctcgacaaaggtacttttgttgaactggacaagttgatggttcaccgctgcaccaactatggcatggacaaaaacaagattccgggagacggcatcgtatccggttacggaaagattgacgggcgccaggtatttgtttatgcctacgactttacagtctacggaggttcactgtctgcttcgaacgcgaaaaagattgtgaaagtgcagcaactggcattgaagaacggtgctccgataattgcgctgaatgattccggaggtgcacgtattcaggaaggaattgaaagcctttccggctatgcggacattttctatcagaacacaatggcaagcggggtgattcctcagatttcggctattcttggtccgtgtgccggaggcgcctgctactctcctgccctcaccgacttcatctttatggtgaaagaaaagagtcacatgtttgtgacaggtccggatgtggtaaagactgtgattcacgaagaggtaagcaaagaagaactgggcggtgccatgacacacagcagcaaaagcggtgtcactcactttatgtgcaataccgaagaagaactgttgatgagcattcgcgaactactttccttcttgcctcagaataatatggacgaaacgaaaaagcagaactgtactgacgagaccaaccgtgaagatgccgtactcgacaccatcgtccccgcagacccgaatgtaccatacgacatgaaggatatcatcgaacgggtagtagataacggctatttcttcgaagtaatgactaacttcgcaaagaatatcatcatcggttttgcacgtctggcaggccgttcggttggtattgtcgccaatcagccggcctaccttgccggtgttctcgacattgacgccagcgacaaggcaagccgcttcatccgtttctgcgactgtttcaacattccgttgattactttcgaagatgtgccgggatttcttcccggatatacgcaggagaacaacggtatcatccgccacggtgctaaaatcgtttatgcgtttgccgaagctaccgttcccaaactgacagtcattacccgcaaggcatacggtggcgcgtatattgtgatgaactccaaacagacaggtgcagatgtgaacttcgcttatccgagtgcggaaatcgcagtcatgggtgcggaaggtgcggtaaacatcctgttccgcaaagcggatgcagagacaaaagataaagaactggaagcctacaaggaaaagtttgccactccctaccaagctgccgaactaggattcatcgatgaaatcatctatccgagacaaacccgcaaacgtctgatccaggcactggaaatgacagagaacaagatgcagacgaatccgcctaaaaaacatggaaatatgcctttataagttataggcgattacctataataaaagagactgtttcagtacaggtgcccccacctgtttctgaaacagtttcttttttcatataaaaagcagaaatgctttcacgcaaaatagataaaactttatacctttgcagtattacattatgaaaaacctgaaaatatgattaacctgaaatgtacatttgccgtcacggccggattgtgctcatctttggcctatgcacaaaaccaaccgcacattatcttaattatgaccgatcagcaacgtggcgacgccatgggatgcatgggtaatgaatctgtaatctccccccatctggacgctttggcaagcgaaggaacgttgtttatgaacggatattcttcgtgtcccagcagtacccctgcccgtgccggactgttgaccggacagtctccctggcatcatggcttgttaggatatggcaaagttgcccccaagtacaaccacgaaatgcctcagatgctgaaagatgctggatattataccttcggtatcggaaaaatgcactggcatccgcaacgaatcaaacacggtttcgaaggaacgctgctggatgaaagcggacgccgggaagatccgaatttcatcagtgactatcgcttatggtttcaaatacaagcaccgggaaagaacccggatgaaaccggaatcggatggaacgatcacggagcagcgacctataaactgaaagaaagtctgcaccctacttattggaccggtgaaatggcttgtcagatgatacagaattatgataacggcaatcagcctttatttctgaaagtttccttcgcccgtccccacagcccgtacgacccgcctcaacgctttctcgacatgtataaggatgcacaggttcccgatcccgtcattggtgactggtgtgggaaatacgctaaagaactggaccccgaaaaagcagccaaagatgctccctacggcaacttcggaaatgaatatgcacgtcactccaaacgctattattatgccaacatcactttcatagacgaacagatagggcgtgtcctccagaccttaaaagacaaggggatgtatgataattcccttatcattttcgtttccgatcatggagatatgatgggagatcactaccactggcggaagacttacccgtatgaaggatctacgcacataccttatattattaaatggccagccaaagcgcaagtcgttcccggtaaggtggataatcccgtagaacttcgtgacctgctgccaactttcctcgaaatagcgggaacctccgttcccaccgacatagacggacgctctctgctatctttggctaaaggcacagaaacggaatggcgcaaatacattgatctggaacatgccacttgctacagtgatggcaactattggtgtgccttgaccgacggaaagattaaatatatctggtacttctatacaggtgaagagcaattgtttgaccttgccaaagatcctaaagaactgcataatgctgtgaacgacaagaaatataaaaagctgctggcaggcatgcgtgcagaaatgatccgccacctcagtgaacggggagaggaatttgtgaaagacggtcaattggttgtccgcaaaaaaacgatgctttacggtcctaactatccgaaagaaaagcgataaatatagcctgcccggatgaaacgcatcactttcgccacaaattgtatctatcatacagataaaatgggaagttctcagtgactgacacttaatttatccgtctaagattgtacaatttgcggtgaaagtgataataagtattttgcaaggagacgtttttcccttacatctgatgatttctcctacatcagataaggagtgagatacttcacaaggaaatatccgccgactaccagccacacataaagtaaaagagccagtacgaaaggtttggctccggcctttctgaatttatcgatgcttgtttctgtcccgagtgccgtcatagccattgtcagcaaaaaggtatccagtgtgttaatacctgccaccaactgcgcaggaagcaaatcaaaagaattgaaagcgatgacacccataaagcctattgcaaaccagggcaccgcaatcttctgaaacttctgtcctttctgcacttgtcttttccgcgctctcgccaccagataggtagtaatcagaagcacaggaaccaacatcatcacacgaatcattttcactatgatggcagaatccgaaataccgtttcccatcgcgtctccggcacctactacatgggcaacctcatgcagagtagcccccgtataaatccccatctgatcgggagtcagtgcacaaagtccgttccggtacaagaaaggatacagaaacatggaaatagtaccgaaaatcacgacagtagacacggacacagccgttttatatggctttgccttgatggtcgattcagcccccagaatagcggcggctccacaaattccacttccgatggaagtaagcaatgcgattccacggtccatcttcagcagcttaccaagatagatgccgccacaaatagtcacagccacaataatcacatcgatcagcatagccggcaacccgatagccatcacatcctgaaaagtcaatctgaaaccatataaaatgataccgatacgcagaatcttcttcgagcaaaactggatacccggcacccacgtttccggaaggtggtttcgcagactattggcataaagcatacccaaaatgataccgacaatcatcggactgaaagaaatacttcttacaaaagacatctcgccaatataaaatgcagcacaagaaaataatgctatcaacaggacaccgtgcagcatgctgcttctcttttcattgaacataaatgatttgatttaagtgatacttaattatttcttttttgcaaaggaagacattttccggcagactgaatcacagaattttattatgtcggataatccctggttataaccccaaagcggttataacaaaaaaacggcacctcgattcacatcgcagcaccgtcacaacacaaacacaaaataaaacacgacaaaactactatgcaatcttacctgttatgccggggaggcatatcttgcttgacttatctatattcgcatacccataagaagctttatcaggtgatttgcataataaataacgcacccattcggattttgttcacaagagttctgaaaaaaatgaagttaagacgactttttaacaaaaaaaacggtaccccgattcacatcgcagcaccgtcacaacacaaacacaaaataaaacacgacaaaactactatgcaatcttcctgttatgccggggaggcatattcactgactcatatatattcgcatacctacaagcagccatcaggcgatttgcacatatataacatcccgattttcgttttgttcacgaaaaaaagagattgaagtttattttctccctttaaaatctttcagaaagccttccatcaaccatttggcaagggcctgacggttggaatccatcaccagtctccgctggtcaaatgtattctgtatattccccagttcgacaaagacagaagcaggagtagtgtgtgaaagtacatataaattgcgtccgctcaccgttccggaaaagccgcggttcggctgatgctttccatatttggattcgaacgtatctttcatattgtttgccagccgtttgctttcggctttcttattagaatgatagaaaaagacatctgtctgcttttttttgctgcgactgtctacatggatgaagatagcgcgacagtaagtatagttctgacggtctttctgataaagagcattgattttattgcaacgctgctgaagacgctgcacctgattcaatggaatcgggtcgcccatacaagtctcacgcttgctgttagagaggtaagcgtcattacggataccatctttggcatcctgaataatgatatgcacttccgccccttcctgcatcagattccgggcgagacgaagtgcaatgtcataggcatattcgtcttcgtgaagttcgtgcttccctacccgtccgatggctcccggatcaggaccgccatgcccgctgactacataaaagcaggcacctgccagtcggttggaagtgacctttacattcgccagttgcttaccgaaaagaggttcatgaagagtggttcctattttcgaagcctttgaggattgttttcttgccggtgtctctttatcagccgccgtcgatctcttgacaggaggaattgtatatgtcacccccagtttcagcacatttcctttccccagctttgccttattcagttccacaaaatcatcgtaatatttctttggagcacggttatgacgcagcaaaaaagtagaaatcccctcacctgctttcggagtagctttttgttgcgcctgcacatcagccaacgaaagaagaaaactaattaataaaagaatatagaatctttttttcatattcgactactaccttatcagtatcatttcacttataaacaggacaaaaatacaattattttccctacttttgccccgttaaaactttttttggcaataaaacttaaaaccctatatcattatggcaaaacaattcaaacccgaaaccctgtgcgtacaggccggatggacgcctaaaaagggtgagccgcgtgtgctacccatctatcagagtacaactttcaaatacgataccagcgaacaaatggcacgccttttcgatttggaagacagtggttatttttatacccgcctgcaaaacccgactaatgacgcggttgccgccaagattgccgcccttgaaggtggtgtagctgctatgcttacatccagcggtcaggcagccaacttttatgccattttcaatatctgccagacaggagatcatttcgtttgttcatccgccatctatggaggaacattcaatttattcggtgtcaccatgaagaaactcggcatcgacgttacattcgttaatccggatgccagcgaagaagaaatctcggcagctttccagcctaatacgaaagcactgttcggagaaacgatctccaatccttctctcgaagtgctggatatcgaaaagtttgcccgtatcgcacacagtcacggagtgcctttgattgtggacaatacattcccgactcctatcaactgccgtcctttcgaatggggagcagacatcatcgttcattctactaccaagtacatggacggacacgccaccagcgtaggcggctgtatcgtcgacagcggcaacttcgactgggatgcccatgcagacaaattccccgggctctgtacaccggacgaatcttatcatggtctgacctatacaaaagcattcggcaaaggcgcttacatcaccaaagcaaccgcacaactgatgcgtgacctcggcagcatccaaagcccgcaaaattctttcttactgaatcttggacttgaaacactgcacctgcgtatgcctcaacattgtcgtaacgctcagaaagtagcagaatatctttctaagaacgagaaagtggcttgggttaactattgcggcctgccggataacaaatactatgcactggcacagaaatatatgccgaacggctcctgcggagtaatctccttcggactgaaaggcggacgtgatgtatctatcaagtttatggattcattagaatttatcgctattgtgactcacgtagctgatgcccgtagttgtgtgcttcaccccgccagccatactcaccgccagttgtcggatgagcagctgatggaagcaggtgtacgtcccgacttaatccgtttgtccgtaggtatcgagaatgcggatgatatcattgcagatatcgagcaggcattgaatgcgtaaaagctgattactatcagataacaaacagcaaaggcacaggatattttgactctgtgcctttctcttttcaccaatgcctcatccctttcttatttactgcctattatcctccttctcaataagaaagttaatttccaacagaatatgtttaatcatgaactgataaatcgctatagatgtttatctttgtaaggaaccaaactctgtatagatatgaaaaagattttattagtagcactcgcgctgtgcctttcttacggatttgcttattcctgtttattcaatcattcaattaatctgaccacaaagatgcagaacttcgaaacggattcgtttaccaccaagaacgggaaaagcctgaagatcactttctttaagcatgccagcttgttaatagaatatgctggaaaaaagttttttattgatccagtctctgattacgcagactttacacagcaaccgaaagctgactatatcctgataacacatgaacaccatgatcatttcgataccaaagcgattgctgctatcgaaactccggatacaaaaattattgccaatccgaattgccagaagatgctggacaaaggacaagccatgaaaaatggtgatatactgcaaattacacccgaaatcaaactggaagcagtacctgcttataatacaactcccggtagagacaaattccatcccaagggacgtgacaacggatatatcctcactgtgggcgacacccggatttacattgccggagacacggaagatatcccggaaatgaaacaaataaagaatatcgatatagcctttctacctgtcaaccaaccgtatacgatgacaccggaacaagctatacaatctgctaaaatcattcaaccgcatattttatatccgtaccattacggagatacgaatatcaatgaagtgaaggacggattaaaaaacgaaaaagaaatagaagtacgtatccgtgctttacaataaaaagacaaacctagttgaaaaataaaaggacgttcctggggaaaaaggggaaatgtgggaacaggaacgtccttaaaaacataataatacaaaaatccggactttcgcaagggcgcatctttgtttctcgtcttatggatatccccttcataaagaagtagtgcattaatccggaagatatcaggagaaggattattatgattgagctcttatttattaaattatctctgtattcgtatatcttatttgttatagaaatgaaaaagaatatttatcgtattatagtgatgactggtaagctgtctgaatataagtaccaattacattgtcattattcatctcgatatatctctttagtaattccgagaatccggattgtatctgttccaccggcttatccgtacaagcagcagaatatgcatctatagccagaagaaaatcctgcatccgttcgttcagcatcgttccttccgtacaaacgacatcggcaatactcgcttttatggtaccgttttcaatcacaacaggcaaacggtattccagtcccattttactggcatggatcgaaagtatctttatgaccggattttctatttttgtcgtgtctgcaaaagcaaactttccatttattatccttgcgctgtcaacaggggcatccgtcgaaacatctttcatgtaaaccattttaccctcaaattccggcagaggcgcactaccgtcaattctgtaaccttttatttgagagcaagctcccaatactaataccccaataaaaaagggcaaaagtcttatacatctattcatcggacttttatttcttcttgaaaagaaagaaaagccgcccgccaatatcagcagagcggctttcacttttcatttatacatttgtataatcattgttcgtcagaatctgaagccaagtttcaccacaggcatttcgaaaattttgatgttatggtgactgacattgtacctatcaaatcctttcggacaaatttgtatcagatcatagcgataagctaaaggatgcatctcaaacccgaaaataaatcctttggcaatgctatactcgatacctgctacggcagctactttcataccatacatctgaccggctttgcttcctgcggtatagacctgagaaggaagttcttccgaatcatcgctatccttataggtatcaccggtgtatggttctgtagtttcaatgcgtgccatctggaagccaagggcgcctcctacgtatggatgaatacgttcgttgcgagtcttgaagtaatagttggagccgacagaggtataccagttattagtcatctgcgcattgatataactttgcgcgggtatgatcatatcgggtacactgttgtcgccttctacatagtctttcttgggagtcaggctgatgttcatgctaaactggaaattgatgtcccagttgtcagacagaaaatacttgccttcgattccagctatattgaccagactattattattcagactaccgatattcagatagcggttcaggtcaccggagttatccgttcctccattgggaagtccgacgactccttcggtgttggtgaacttgggaagcagataagaggtgttctcattgaagaactttccgctaccaagtaaaaccgaaacctgccactgtcctttcttcggagcaaacgacgcatcatcactgctgctgtaacgctgcgccaatgaaggcgcagctgttatacaggtcagcaaaagtaatgtgcatagtttctttatcattttgttacttttacgtgattaagaaattacttactcaaggtttccaatacagccttaacttgtgcaagagcagtatcatagattgctttcgctacatcataagcttcttgagctgtttccaaagcaagtttcttctgttctattacataagcttccttatattcacccttgttgaacagttcaatgctcttttctgctgcagtaaccttctgtttagcttcttcaactgatttttcctgagtagcaacttcattcttccaataattcagaacagattctacagttaccacagtaccagtgactacaccaccgttgataccatcaatctgatcttgaacaacactgatcaagccatcgtaatcttggatcaattcagcaaacttcttactattagcctcagcttcagcagtcaatgcatcttgttcctcttgtgctttcttcacctcttctttagcagtcttcagagcaatacgagtctcgtcagcttttgcaataaacggatccattaaagctgtattcgtatttatttctgcattcagatcggcaagtacaccttccatttgagccttcaatggtttaatcaagtcggcagcagcaatcatatctttgcaagtctgtacatcgtcattagcagccatcatagctcccaaagtaccaaagtcagtcaaaacagcactattattctgcttaatataagcgcggaccattgcttctgttacttcaacaagtctgtcttcgccaggaatcacagtaccaaaagtagcatcagaggtatactctaaagcatcttcagctgtattgcgatctaacttagttgcacttaatttagtaaactcatctgcagaaatatcagagcgtaatgcctgcatgtggccagttttcttaccatctttttcctcttctttatagaaagcatctttgcctgtcatatcttcaacactaactgtattagccagtatctgaccgtaaggattagcagcaagagcagaataagtactaattgcaggagccaccttagcaacagcagtagcagcctttccagcagcttcaaccaatgcagctttagccttttctactttcttatctttatcatcagcaagagcttgatttcctgcagcttcacctttggcagccaaatcagcaacagtctgatcaagtttcagccattcagccaaagtagcattagcatcagcctttgctttagcttgtttcactgtatcgtccaatatagcttccagtttgctggtagtttgttcagcaggagtcaatgcctcccatgcagccttactagtaggagacaatgcggtaatcatattgtcacggtatgttttctccaataccgaagctttttctttttctacagcagcatcataagcagcttgatatacggcatcccatgcactattataagctttcactgcagattctactgcggcataagaagaattataagcatctgtcacctttttcaaatcagtagttggtactgtagttgctgtaccttttaccgcttttgcagaaatttcccagttagctttatctttttcaaatttttctttagcatctttggctgccttttctttttctgccaaagtcaacttattccattcaactccattttcgtctacagaatatttacctaaagcatcaatccaggcatttactttcatcagagtaagagatgcctgactagttctggctgttacatcttctatcttcaaatcggcattgtactcagtttgcgtatactgaacagcctgataatcaaacacacctgtactaacagtatatccatctaaagatgtaaaatcattgctactactaaataatgtcttcaatccttcattaataggttcagatttataagctgcaatatcaagctgagtattaacctgtgttgtagagtctgctacagctttatcatatgcctctttagcagctttacgcgcttttatcttttcggctactttttgttctgcagctttataatttgcggaagtcttaatagtagcgatctcaacatcagctttgctcttttcactttcatattcagatttcttcttcttcagatccaggatcttatcatcccatgcagctgcatcaaagtcttctgccaaagctaacatattatttttctcatccaataagatttctgccttttcaactgcaatctgtgccaacttcaattcagcctgcaagctagctaatgtcggaagattaggattaaccaatgcatcataataattatcctgagctgtctttaaagcatcgtaatattggttcagactagcagaagcaacataaagtctttgctgtgctttatcaataatagctttttctccatcagaaagcagaagttttcctgcttcaatcagtttcattgcattatcataagcttcttgtgcctgtgcagtctgagtctgatagttcaacatagctgctttgaagatttcagcttcttcagccattttattttcccagtaagctttgtctctgttagcttcagcaatcttagcttccgcctcagcttttgcttgttcggtagcagcttgtgcgcgttctacttccagttctttcagtttcacgtctaaagcatgcatctgaacatcgtactctttgtactgattatccaattctttagatttgtttaccagttcctgataagctacttgcgctttttgccattccacttccaccagttttaccgcagcttgcgctttaatcagttcggattttgctccccgcagatcaacgataccttccggttcatcggtatcaatacatcccgtgaatgtagctgtcgtacccgccattagcaaggttgcgaccaaatacgtccattttctcataaaagtaaattaaatgttatacaattaataaataaaaaatttgtttgctgtcatttcataatccatctcatcttggtggtctgtctttctgttacttcttaggtaacgggaaagcgtgtatttccaccccgacagaggtgtctgcgggctacattcattaaataagtaaagaatatttttagcccctgctcacagacgatggcagaggggagggaaatcttttgcaaaaattaaagaccagatcgtgttcttctcaaaaaatccgcagttttgttcagtgtgtttcctttttttagtagtttatcagaaaaaatatcatttttgtttgcatgttttccaaaatatacccatatttgcagcgtcttttcttcccgttacctacaaagtaacaattctctaaatcaagaacttacatacaccacaatccttctttaaggaagaaataaccgctacattcgcttcatcaattttcttattcttgaaaggtttcagatacgtttccgtcacggtgatggaagaatgccccatcgcttcggaaataacaccgggatgtacctcacaatagtatgccatcgtagcccaggtatgacgggcagtgtacgagcttacttcagatgtcaatcccaaaacctgtttcaaaatcattaactgataattaaagttgcgcaatgccagctgatattccttgtaagcagcttccgttccctctccactggtgatcagcgaaaaaagatagggagaagcaggatcggtattcatataccgtttgatcagcttcatagcttccggtacaagagtcactgttaataacctgccggtttttcgacggcggtaagtcattacattcccatcgatatcatgctttttcagataggcaagatccacaaaaggaatcccacgaagtaaaaacattaaaaagaaaagaccacgagtacgctgtagttccttgttatcctgacacagctgtttcggaagttccttcatcagacgctccatgtcttccttatccagcgcacgtttcctgtccgcgcgcgttcctgtatagacataccggaagtgatgaggcacataaggcgcaagatggcggtcgaccgcacggttatacactgcacgcaacgtacgcatataagtggaaactgtattccagctacagttcctgccacgcagatacgattcgaaacttttaagaaactcctgacttactttccggaaaggaagcttatcacttccatgaaaggcaaggattgcactcaggctactcctgtaaatatgggcagtcccaaaattcccactttcccgcagcccatcggctacttccttcataaacgaaattaaattccccattttctactgatttaaataatactcaaaagatacgttcgtagagaaagccgttcccttacccactctgctttccccagtgttctttgtttttctattctctaaatactaataagacaaagatagaaataaatttgttcggtgaccgaaccgtttcataaatctgttttataaaggaaaataagtgacttatacttatttttcatacatttgtatgcaacaaagaaataaacatggaacaatcgaagaataaacgtacacgccgtacccgcgccgaactggaagcggacgtgtttgatgccatccgccagctagcaagtgaaaaaggtctggcgcaaattacctttacggatattatgcaaagagccgacatacaaatgtccgtcctgctcaataactataagaatatagagcgactgctggataagtacgcttacatttctgattattggctgcacgatcttttcgatgaagagcaccctacagacaaagccaacgaggacatcatgaaaagcaccttaaaggctttggcaaattacttatatgacaataccgatatgcagcacttgctagtgtgggaactcgaagcagacaattcgaccacaagacgtatggcacgaagcagggaaaagcattacaaagtggctatagaagaatacaaaaatttgtttgaaggaacgggtatcccaattgatataatagcgggacttcttactgccggaacatattacctgatattacaccgtaagcgttccacattttttagtgtggattatcagcggaaggaaaatcgggaacgcttgtacagtacacttgaatatctttccggtctggtgttctccgcgctcaaagagcacaaccaaaccatagagatagcccgcaatttcaagcagaaaggtatagcggatgatgtgatagcagaatgcacgggtttgtctgtcgatgtggtgaaagggctttagattgatcatttgtcaagttttcatacggagacaaaggacagtccatccgccttaaccaaacaagcgaagaactacattattagaaattaaacgttttgagcagtcataaaacagcagttataagacagataccgctgtactgctatccgattaatacatagcatgatacaagttgctatattctcaaagtattctcatgcctttgagaaaaaattctcaccacagtgagaaaaagttctcatgcctttgagaattatttctcaatgcgatgagaaaatattctcacgggcatgagaataaaagcgtttatactaacctgccaacggttaactgcctttctgcttatctccgggtttaattgacaagatttaaaaaacaacttaatatatcacatgatcgggaatttcagagaataactcatttcaaacaaataaaaaggcgtgcctgcttaaaaagcaatacacgcccttcctttcatacacaaacattaaatttatccagtttcaggtgttcgtcaatataccgaatgccgtccacctcaaaaagtcctcgtaagagagtatggttcagcgcctgctgaacaacatacggagtaccttgcaggcaactctgataaataacctcctgcaaatctgccgcaaagcgatccggatcgactcccggaagcaggtaaccacagattttacaatgcgtcagtacgtcgataaactgctgcaaccagaaggcctcttcccgtttgaaggaagcgctgtaatcttcgttcgcggcgatatccagcaataaagtctttcctaacgaatgcaatagcgtgagatacccgttcactgtggcaaaaagcacctgcatacacgaactgtccatccgcatctgactttgtttcagacaacttctgatcccgttggtgaaatcagaaagacagatgcggaacagacaagtcttactggggaacagcttgtaaagcgtacgcttcgacatcttcatccccttggctatgtcatccatggtcagtccgtcagcaccgtgcagatacatctcgtgtttggtgtattcgattatctgacaccgtactttttcaggattcatactatcctcctacatccggcctccgcccaaagcctgatacagtgtaatcacgccctggatttcggtaaagcgattggctacctgtgaaagtctggcgttcagcaatgtctgctgtgcggtcagtacttccagataagtagtattattactatgttccatcaacagactagtgcttctggcagcagtctgcaaagaggtgatctgcttatcgtagaaagcggatttctcacgggccgtctgatattgcaccagtgcctcgtttacttccacacctgcgttcagcaatgtctgttcaaagctgaggcgggcttcttcctgctgtgccttcgctattttcagctgggcgatattcactcccttgttaaataaaggttgcgtcagtgaagctacggcagaagcaacgaatttgcccggattgataatcatgctaccggcactgtttgtccatccggcactcccgctcagcgtgatggaaggatagaaagcagcacgggcagcattcgtcgtatagaatgcctgcgctaaagagaactccgcgctacgtacatccggacggttggaaagcatctgcaaaggaatccctacggagaagtcttccggcaactgctggttttccagtttgccgcgttgtatcttgtgaggtgtttccgccagcaacaaagccattgagttctccgtctgattgatttgttctttcaggtcgagcactgccgtacatatattataataggtggcttccgtctgagccagtccggcttcggtcatcataccggccttcttcatggcacgggctgtccgcacgctctctttccatgccgcttcggtggacacggaaatctcatattgagcgtcgagcatcaacaaggtataataagtatttgccacggcagacaccaattgcgtcttcaccgcctgttcatactccttgctctgctcataggccgcttttgcccgacgtttggccgtggtcacctttccgaagatatccagttcccacgaggcagtcaccggcaatgagtaggtctgagtcgctttgccacggtcgaagctgctcacagctccttccggtgcgagaaacaaagagggcagataagaaagcttggacgtcagcaacgaagcctccgcttctttcacacggagatgcgctgtctgcatatccgtattccgtaccaaagccgaatcgatcaaattctgcaaatacgagtcagtaaagacctctctccacgagagattaccgaagttcgccgtatcggcggaagcgacggtttcgcttccataaagtccttcggggacctccgatactggtttgtatttattgtagataccgcaactgctcaacacgagcgttgctgcggataagattaatattttcttcatcatcaattatttttttcctgctttagatttttcttcttcactcaccttgatttcttcctcgatctgccagtcttccgtaggtctgctctgcaccgggcgtaagcgttcctgcaaccactggaaagcgataaacaaagtaggcacgatgaaaagtaatgccagcgtaccgatcgtcataccaccgactacacccgtacccagcgaacggttaccattggctcctacaccactggacaacatcaatgggaacagaccgaagatcatcgtcaatgctgtcatcagaatcggacgcagacgggctttggctgcacttaccgcagaagcgatcagtcccatgcctgccttacggcgttcggcagcgtattcggtcaacaggatggctgtctttgccaacagaccgatcaacataatcaaacctgtctgcaagtaaatgttattctccagtccgaacatccatgcgaagaggaaacttcccatcaatccgcaaggcacactcagaagcacggcgaacggaatgataaagctctcgtacaatgcactcagaatcagataaatcatcaggaagcagataccaaagatgatcatagtcgtaccgctttgctgattttcctcacgggtgatgcctccgtaatcatagccatatcccttgggaagagcctgtacggctgtttcctgtacggccttgatagcatctcccgtactatatccgtctgccggcatcgcattcacggcgatggaattgtacatattgaaacggctcagcgactctgcgccgtagctgcgtgtcaacgttacgaactggctcagcggagccatctctccgttcgacatacgtacgaaagcattgtccagtgaagtttcgtccagacggaattgcgggtctgcctgaatcatgactctgtatactttagagaaacggttgaagttggacacatactgaccgccataataaccggacagtgtgctcaataccgcatccggtgtaatgcctgcgcgtttacacttggctgcatccacctctaccgtccactgcggatagcgcacgtcgaacgtagaatatgccatcgcaatttccggacgctggttcaatgctcccagatattgctgggtagtggtaaagaattcgttgatatcaccgcccatcttatcctgcatatggagttccagcgcattacccataccgtaacccggaatcatacccggcgaaatagcgaagacactggcatccttgatatcggccgtacgaccgtacacctgaccgatgactgcctgcacattatcctcatcattcggacgttcgtcccacgacttcaatttcagaatcaacataccgaacgagcttccctgtcctgccagcaatccgtagccggccactttctgcacgtgcttaatctgcggaatatccatcagacgcttttcgatgcgttccatcacttcgtcggtcgtagtcagcgaactaccggccgccgtacttacattgacgaataccacaccctggtcttcgtccggcaccagactggtctttgttgtgttcatcaggaatacaagcaacactacagagcaaacgagcagcgaccatgccagccatctgcgtttgataaagattagtaccacattcttgtatttctctatcagaatatcgaaagccgagttgaatgctttacggaaacgtgccgcaaagttattcttctgcgtaccgtcttcattgatataaggcttcaacagcaacgcacataatgccggactcagcgtcaacgcattaatagcggaaataccaacggcaaccgccatcgtcagaccaaactgggtatagaacgtaccggaagtaccgcccatgaaggataccggaataaatactgccataaacaccagcgaagaggtgataacagcattactgatacctttcattgcatcgatacttgccatataggacgacctgtatcctacgtcgaagcgtgcctgcaccgcctcgacgacaataatggcgtcgtccaccaccgtaccaatgacgagcacgagcgcaaacagcgtgagcagattgatactgaatcctgccaccgccatgaaagcaaacgtaccgatgagcgaaacaatgactcccaccaaaggaatcagcgtagaacgaaagtcctgcaagaacacatataccaccagaatcaccaggataatcgcctcgatcaacgtcttcaccacctcatggatagaagcgaacaggaagtcgttcgagctcatcatctgtgtcagttccactcctttcgggaggtctttacgggcttcttcaaggaatttatcaatgttctggtttacttcggtcgcattggagcccgccgtctgaaacaccatgcacgaaacgcccggatgaccgtccattccaccgtgataagcatagctatcctgtcccaactgtatctcggcgatgtctttcaacttcaggacctcaccattgtccgtagaacgaatgacaatatctccaaattcttccggagtgatcagacgtcctttatatttcattgtatactgataggtttcgttcgagttttcaccgaatgaaccggtggccgattcgatattctgttcggcaagcacaccggtgatatccgatggaatcagtttgtactgggccatcacgtccggcttcatccatacacgcatgctatattcacctcccataatcatcaggtcgcctacacccgagatacgcagaatctccggtttcagattgatactgatatagttggaaaggaagttttcatcgtagctatcgtccggactggaaagcgagaacatctgcaggatacttgtctgacgtttggaagtagtcacaccgacctgcgttacttctgccggaagctgtcccgtcgctctcgacacgcggttctgtacgttgaccgctgccatgtccgggtctgttccctgcttgaagtacacggtgatactcactgtaccggcattggtggcgctggaagtcatgtaagtcatgtcttccacaccattgatcgcttcttccaaaggagcaatcacactcttctgcaaagtttccgcactggcgccataataggtggtactcaccataatggtcggcggagcaatatcgggatattgttcgacgggcagactgaacagcccgatgatacccacaacgacaatcgtaatagagatgactgccgataatacggggcgttcaataaaggttcttaaattcatggatgattcctcctttgtttaattttcagtagttgtcgtagatgcctgggcagtctttgccttaatcggagttccttcacgaagtaatcctacgccttccgccacaatcacatcgcccggagccagtccttcatccacgataaattcgcggccaccgttcacacgggtcacctgcaccaaggcagattgcgctttgccgtctactaccttatatacatatctcttatcctgtatttcgaacgtagctccctgcggaatcaccaaagctcccgttttctgtaccggaatcactacgttacccgcaccgccgctgtgcagcagtccgtccttattagggaaaacggcacgcaggctaacagtacccgtcgaacggtcaatgactccgctgatagactcgatctgtccctgttcgggataagccgatttatcgttcagctgcaagtcgatggcaggcatacttttcagcgcctcgtctttagagccatactggcgaatcaatcccagcaactggttttccgtcatcgagaagtagacgtacatgtccgaattgtcggaaacggtggtcagcggttcgggaatgctggaactcaccaacgcacctacgcgataaggcaatgtacctatcactccgtctgccggactcttcactaccgtataagaaaggttattacgggcgctcacttcttgtgccttggcctgcgccagttgggctttggcagccagaagagaattttttgccgtactcagatcgaaagcggaaactacattctccttatacagttcctctttgctgtcgtaagtcagctgtgccgttgccagagacgctttggctgactccacattcgccactgccgtctgcagggctgcctcatacggcacttggtcgatgatgaacagcgtctgtccgctcttcacccgctgtccttcggtgacactgacttttgtcagcgtaccgcctacctgtggataaatatcgatgtcctgacgtccgcggatggtcgccgaataggcactcgaaatcatccggtcggtcggagaaacggtcattacttcatatcctgtttccatttgtgtgggtggagcttgcttacaacctgcagcagcaaccagacaaccgagcaataatagcccttgcttcattttacatacctttttactcattgtgttacctattaaaatttttgatcgcggcaaaggtagactcttttcaccacagaaaactggtcatagtgtttagagttttgttcattttcggaacaatatgagcgatatttagtgaaaaagtcctatttttgcccactaaataagaatagttatgatacagagaaactctacccttgccgttctccgggaatcatttgttgccggaagcgatgagaatttgtcacctatcatgcatcacctctggaaaatggaagggggtgccatctatttctgccgcagtggatgggcacacgtcaccatcgatctgaaagagtacgaaatcatcaaaaacactcaggtggtactgctgccgggaagcattatccgcatcaatggcagcagcagtgacttcacagcctcctttttcggatttcccaaagatatgtttcgggaagcctgcctgcggttagaaccgaccttcttccgctttatgaaggaaagaccgtgctatgtacttcccgataaggataccggagctatcaacggattgatacaggcgacaactgctatttataatgatcgcgagaaccgcttccgcaaccagatagccaagaatcatctccaatccttcatgctggatatttacgataaatgctaccgctacttcgacaaacaggaaatagaagggggaagccggcaggacgaaatcttcaagaagtttgtcgcattggtgcacgaaaactgcatttcacaacgggaagttaacttctacgccaacgaactttgtatttcgaccaaatacctgacaggcatctgccgcagtgtgaccggagattctgccaaaaagatcattgatgatttcgccattctagagatcaaagtactgcttcagtctacggagctgacaatgcaggatatagccgaccggctcggtttcccggaccagtcgtatttaggaagatatttcaaacggcatgaaggaatgtcgcctagagaatatcaaaacagatatgttatatagcaatcagaaaaaagaaataaccattatacattaaggagtacagagacccggatagcaaccataagtttgtgcaaaatcagtcattttgctataaaattaatagaaattatcatctaaagacaacaatgtataacttttattcctacatttgcagccaaatgataacttattaataaaaataccaataccatggctaaaataaccaaagaagccgctttgctctaccattcgcagggcaaacccggtaagatcgaggtagttcctaccaaaccttacagtacacaaactgatttatcacttgcatactctcccggcgtggcagagccttgcctcgaaatagagaagaatccgcaggacgcttacaaatacacagccaaaggcaacctggtagctgttatttctaacggtacagccgtactcggactgggtgacataggcgcactgagcggcaaaccggtgatggaaggcaaaggtctgcttttcaaaatctacgcaggaatcgacgtgttcgatatcgaagtggacgaaaaagacccggagaaattcatcgctgccgtaaaagcaatcgctcctactttcggcggtatcaatctggaagacatcaaagctcccgaatgtttcgaaatcgaacgccgtctgaaagaagaacttgacatccctgtgatgcacgacgatcagcacggaactgctatcatctccagcgccggactggtaaatgccctgcaagtggccggaaagaaaatcgaggatgtgaaaatcgtcgtaaacggtgccggagcatctgccgtatcttgtaccaaattatatgtatcactgggggcacgcctcgaaaatatcgtcatgctggacagcaaaggcgttatcagcaagacacgtaccgacctcaacgaacagaagagatattttgccaccgaccgcacggatatccacacattggaagaagcgatcaaaggcgccgatgtattcctcggcttgtccaaaggtaacgtactgagtcaggacatggtgcgcagcatggctcccatgccgatcgtattcgcactggcaaacccgacaccggaaatctcttacgaagatgcaatgagcgcccgccccgacgtactgatggcaaccggacgttccgactatccgaaccagatcaacaacgtaatcggcttcccgtacatcttccgcggcgcactcgatacacaggccaaagcgatcaacgaagaaatgaaaatcgcagcagtacatgctatcgccaatctggcaaaacagcctgtacctgatgtagtgaacacagcataccacgtcaacaacctctctttcggtccggaatacttcatcccgaaaccggtagacccgcgcctcatcaccgaagtttcctgtgccgtagccaaagcagccatggaaagcggagtggcacgcacggaaatcaaagactgggacgcttactgcgtgcatctgcgcgaactgatgggatacgaatccaaactgacccgccagctttatgacaccgcccgccgcaacccgcaacgtgtcgtattcgccgaaggcatccatcccaacatgctgaaagccgccgtcgaagcaaaagccgaaggcatctgccatcctatcttattaggaaacgacgaagcaatcggcaaactggccgaagaactcgacctgagcctggaaggcatcgaaatcgtcaatctccgccatccggacgagtcggaacgccgcgaacgctactcacgcatccttgccgaaaaacgtgcccgcgaaggctttacctacgaagaagccaacgacaagatgttcgaacgcaactacttcggtatgatgatggtagaaaccggagatgcagacgcatttatcaccggactctacaccagatacagcaacaccatcaaagttgccaaagaagtaatcggcatccagcccggattcaaccatttcggaacgatgcacattcttaattcaaagaagggtacctacttcctggcagatacgctgatcaaccgtcatccggatacggaaactctgattgacatcgccaaactggctgacaagacagtccgtttcttcaaccatacaccggtcatctcgatgttgtcgtactccaacttcggcgccgatacctccggcagccctgtcaaagtgcacggagcagtgaactatatgcagaaggaatatccggaactcgccatcgacggtgaaatgcaggtgaactttgccatgaaccgcgaactgcgtgacgccaagtatccgttcacccgcctgaaaggtaaagacgtgaatacgctgatcttcccgaacctgagctccgccaacgcaggatacaaactgctgcaggcaatggaccccgatacggaattcatcggccctatccagatgggactgaacaagcctatccatttcactgactttgaaagttctgtccgcgacatcgtgaacatcacagccgtagccgtgatcgacgccatcgtagtgaagaagaaaaacgaaagccgatgagaaggccgttatcaaaatcacaaatagtttgcgtcagcctgctttggctggcgctttgctatttagttctcacaaaagccgaacgtattgacggtatgacgatagtaatgcttgtcatttcggcagcattagtctttattcctgtctataagtcgatgaaaaagaataaataaatatcttttttctgagttttaatgcaataaaatatcaaatttgatgttttattgcatttttctttataaaatgtttgctagttcaatttttatctttacttttgcaaccgcataaaagaaataggtaatcgaaatttaatcaaccaataaaagaaaaaaagattatgaatgcagcaaaggtattagacgatctgaaaagacggttccccaacgaaccggagtatcatcaggcagtagaagaagtactttctactattgaagaagaatacaacaaacacccggagtttgacaaagcaaacttaatcgaacgcttgtgtattcctgatagagtatttcagttccgtgtaacttggatggacgacaaaggtaatattcagacaaacatgggttaccgtgttcagcacaacaacgctatcggcccgtacaaaggcggtatccgtttccacgcatctgtaaacctttccatcctgaaattccttgcctttgagcagacattcaaaaactcactgactacgctgcctatgggtggtggtaagggtggttccgacttctctccacgtggtaagtcaaacgctgaagtaatgcgtttcgtacaggcattcatgctggaactgtggcgtcacatcggtcccgaaactgacgtacctgcaggtgatattggtgtaggtggccgcgaagtaggtttcatgttcggtatgtacaagaagctggctcacgaatttaccggcacattcactggtaaaggccgcgaattcggtggttcactgattcgtccggaagctaccggttacggtaacatctacttcctgatggaaatgctgaaaaccaaaggtactgacctgaaaggcaaaacttgtcttgtttccggttcgggtaacgtagctcaatatacaatcgaaaaagtaatcgaactgggtggtaaagtagttacttgctccgactctgacggttacatctacgatccggacggtatcgaccgcgaaaagttggattacatcatggaactgaagaacctctaccgtggccgtatccgcgaatacgcagagaaatatggttgcaaatatgtagaaggagctaaaccttggggtgaaaaatgcgatatcgcactgccttctgccactcagaacgaattgaacggcgaccacgcccgtcagttggtagcaaatggctgtatagctgtatctgagggagcaaacatgccttctactccggaagctatcaaagtattccaggacgctaagattctgtacgctccgggtaaagcagctaatgcgggtggtgtatcagtatcaggtcttgaaatgactcagaactccatcaagttgagctggagcgctgaagaagtagacgaaaagctgaagagcatcatgaagaatatccacgaagcctgcgttcagtatggtactgaagccgacggatatgtaaactatgtgaaaggtgctaacgtagccggattcatgaaggttgccaaagctatgatggctcagggtatcgtataatcagcaagatataagaaagctatagtcatttttaagataaaggctcccgccttccgaaaggaaggacgggagttttttatattgtaccgcagtggtgaaaaacaagtaaaagagtgcaggcaaacatgtaaaagagtgagtgacaggaagtacttcattctggcaaatgatgtagaagaaaaaggtaaaagaagtacatgacccgggtgaaagatgtacttgaaataaaaaataccggaggttttaaagattgttcatagttattctctatctttagatagaaattatcagtttgacaagcaagcaaaatcggtctatctttgttacatattataaacccggacagaagagtaaaaaagacttcggtttatttaaacttcgcctccgactaacatctattttatggaagaaaaaaaactaactgccgcgaacggtcgtcccattgccgacaatcagaattcgcaaaccgcaggtcaacgcggacctgtcatgttacaagacccatggcttattgaaaagcttgctcattttgatcgtgaagtgattccggaaagacgtatgcatgccaaaggttcgggagcttacggcacattcaccgtcactcatgacattacgaagtacacccgtgcagctattttcagcgaagtcggaaagcaaactgaatgtttcgtccgtttctctaccgtagccggagagcgtggggcggcagatgccgaacgtgatatccgcggttttgccatgaaattctacaccgaagagggcaactgggatttagtcggaaacaacactcctgtctttttcttacgtgatcctcttaaatttccggatttgaatcatgccatcaagcgcgacccgaaaacgaacatgcgcagccctaacagcaactgggacttctggacacttctgcccgaagcgcttcatcaggtgacaatcactatgagccctcgcggcattccctactcctatcgccacatgcacggattcggaagccacacctatagttttatcaatgcggacaaccagcgtatctgggtgaaattccacctgcgcaccttgcagggaatcaaaaacctgacagatcaggaagcggaagcgatcatcgccaaagaccgcgaatctcatcaacgcgacctttttgaaagcatcgaaaagggagattacccaaaatggttattccagattcagttaatgacggaagaggaagcggaccattaccgcatcaacccgttcgacctgaccaaagtatggccgcacaaagacttcccgctacaagacgtcggaatccttgaactgaaccgtaatccggaaaactatttcgcagaagtagaacaagcagctttcaacccgatcaataccgtagatggcatcggattctcaccagacaagatgttacagggacgtctgttctcttacggcgacgcacagcgttatcgcctcggagtgaacgccgaacaaattccggtgaataaaccccgttgcccgttccatgcttaccaccgtgacggagctatgcgcgtagacggcaactacggtgcaaccaaaggctacgaacccaacagttacggagaatggaaagactctcctcacatgaaagaaccgcctctcaaagcatccggcaacggagaaatatacaattataatgaacgcgaatatgatgatgattactacagccagccgggagatctgttccgcttgatgccggcggacgaacagcaacttctgtttgaaaacacggcacgtgctatgggagactccgaattattcattaaacagcgtcacacccgcaactgctacaaagcagatcccgcatacggtgccggagtcgccaaagcattgggtattgatctgcaagaagcattgaaagaataaaagaacaaccaaccatttgtcaaagaaagagcatatttcccgacggatttatgctctttttttcgacagaacagtaaacagatgtatatcagcagaataaaaatccttttttattcctttaaaaggaacgtcccattggttttaaagaaacaggccgttggttttaaaccaagaccccgttcctttaaaaccaacgggactatttaaaaaaaagttctgcttttccaatgagagcagaacttttttgtttcatttatttatcaaccggaaagagatcagtcaatccccggcatcagaacaacgccgagcttcttcttaccatccatcttgactaccatcggcttttcaaagcggacatgacgcaggaatttcgtttcttccaccgcaggttgggcattgaggaaatcctgattgtagactccgtcattcataaaggcattgatcgtaaaatagcctacgccgaacgaagtgaggttctggaagaagtgagttccctgactcgggtctacacgataattggtcagtccggcctccactatcacacgggcggcggagatatgcggccacttcaccggaatgcccagccatgtatcactgctgccccaacgtcccggacctacgagcacataattccttcctgcattgaggaattgcaggttcattttctctatttcccaggcaatggcctgattgttcgaagcactgtatccatccgtcttgacgtagacgatatcataaatttcgttcatgacgccatgccccaatgagttattggaacggagcaccacgtcttcatccggtatcagcgtcaagtcttcgtccagcatttctttgctgtccacaatcgggcggatttgcaacaggtagaatgtacccgtcttatcttgttcacgactcaaggtcgcggcaaactcaatctccaccgggcgccgcatttcctgttcaccgtacttcaaaaccagttgcaggatgcgtgccagcgggaatacatcgtgttgaaggatattggcaaacgtgattaccttgcgtccaccgggatacaaaccgtcacggatcacctgatcatacggatcgtaagtagaagcgatatagcgtaacgaaccgtcactttcggcttccttcacatgaagtttcaacaggttaaagccgtcgtcgatagagaaatcatgccctgcgtttttcaagtccaatgcgtagaaacgggtctgtgtttctttcagggctatttccatttcactggtttgcaacacttgattcgggtgataaggagagaaacggagcgtcatacctccgtctacaatatattttcctaatccaagagccaggttcaccgtgccttcttcggctttttcatctcccaagggataataattgagcgaacgtgccacgccggacatagacgggtagtaacggtctccgtattgatttcccacaacttcctgcaagatgactgccatcttttcttggtcgatcacgttcgatgtagcctgcatataggctttactgtctctgaagtaaaccgatgcatagactcctttgatcgcatcggaaagcatacggagcatttcgtaacggtcgtccagataaggaatcatatacgtattgtatattccggcaaacggctgataatgagaatcttctaacaaagaagatgaacggatggcaatcggggatttcaccacatcaaagaaggtgaagaagtcctctaccaaccggtcgggcagtttcgccttcaggaaatatcgtagaatcgtatcatcgtcggcatccgatagagcgatttgataaagattattggtctccataaactcgtcgaagacatcggtacacagtaccactgtcttaggaattgccacccgtgcattttcgaactcttcaaattcgggataacgcttcaccatattatcaatgaaggcaaggccacggccttttcctcccaacgaaccgtcgccgatacgggcaaagttggagtaacggtcgaaacggtcacgtttgaagacggcaaccactccctgatttttcatcttccggtacttcacgatcgcctcgaagataatccggcggtgtgcatctacgtcctgaagactggtccacgtgatcggcttcagaaactcggctaccggaaacatggcacgcgaatagagccagcgcgaaacgtgattccggctgatatgatacaagaaggactcggcaggcacggcaaacaggatattctgcagctctttcaggttccgcacacgggcaatctcttctccggtctccggattgcggaacacaaagtcaccgaacccgaagttatcggaaacgatgcgccgcaggtcaacgtccatctttttagaattcttatcgataaagctggcaccgtatttggcggcatacgaagagttttccgattcggaggactggataatcaacggtacgaacggatcgttcttgcgtatggcggcacaaagcttgatacctgccagaccgtctttctcgccccgttccactttcgggaaacggacgtcggtaatgactcctaatatattattctggtatttgcgatagatttccatcgcttcctgatacgtacgcgccaaaacgattttaggacgcccacgcatacgaagcgtgcgctggtgcgcattcagagcttcggtagaaaattcctggctctgcttcaacacgaatttatacaggttgggaagaatggaagaatagaaccggatgccgtcttccaccaaaagtatcatctgcacgcctacttcctgcacatcatgttcgaggttcatcttatcttccatcagtttgataatagaaaccaacaggtcggtattgcccagccagcagaacacgtattcaaatgcgctcaggtcttcgttgataatccgcttcgtaataccgtgactgaaaggagtcaggataacgatcggaatatgttcgtatttctctttaatatgccgcccgatatcaaaactgtcattgtctcccgtactcggcatacagatcaccagatcgaatgacacattctccaactgcgtcaatgcttcctcttccgtagaaacctgtgagaaacgaggcggataacgaagtgacaaggatgtatattcattaaatattttttcgtcaatgcgtccgtcatcttccagcatgaaagcgtcatacgggttggcaatcaacagaacattgaaaatccgccgtgtcatcaaattggcgaattgcgtatctttgaagtaaagctggtttaatttatacttgctgagcatagtctctttctattttttattccataatgaaatgattcatagtacagtctacttgacgtttaccctgcaaagttaattttttaaatctcatttgctatcatcttctttataaagtttataataggtaataagtaataggtaataagtaataggtaacaagtaataaccatgcggtttacagcgcagcttattacttattacttattacttattacctattacttattacctatcacctaccactatcattttatcattatttaatcaaaatatcaccataaaaccaatcatatttgaaaaattttcctatatttgcagtgtgaacagtttacattttatcagaataaccttttaaaatatgatatcatgaacatccagaaaatcatgtcctctttggaggcaaaacaccccggtgaattagagtatcttcaagcagtaaaagaagttcttctttcgatcgaagatatatacaatcagcatcccgaatttgaaaaggccaagatcatagaaagactggtagaacctgatcgtatcttcactttccgtgtcacttgggtagacgataaaggggaagttcagaccaatctcggttatcgtgtacagttcaacaatgcaatcggtccgtacaaaggcggtatccgtttccatgcttccgtcaacctctccattttgaaattcctcggcttcgagcagacattcaagaatgcgctgactacccttccgatgggtggcggcaaaggcggttcggacttctcaccccgtggcaagagcgatgctgaaatcatgcgtttctgccaggcgtttatgctcgaattgtggcgccatctgggaccggacatggatgtacctgccggtgatatcggtgtaggcggacgcgaagtaggttatatgttcggtatgtacaagaagctgacccgcgaatttacgggaacctttaccggaaaaggactggagttcggcggttcgctgattcgtccggaagctaccggcttcggcggtttgtacttcgtttatcagatgttgcaggcaaaaaatatagatatcaaaggcaagacagtcgctatctccggcttcggtaacgtagcttggggcgctgccaccaaggcgaccgaattgggtgccaaagtaattacgatctccggaccagacggatatatctacgatccggacggcatcagcggagaaaagatagattatatgctcgaacttcgggcttcgggcaatgacatcgttgctccttacgccgaaaaatatccgggtgcaaccttcgtagagggcaagcgtccgtgggaagtaaaagcagatattgcacttccttgcgctactcagaacgaattaaatggagaagatgcacaaaatctcataaaaaataacgttctttgcattggagaaatttccaacatgggatgtacgccggaagcaatcgacttatttatcgaaaagaaagtaatgtatgctccgggtaaggcagtcaacgccggtggtgttgccacttccggactggaaatgtctcagaacgccatgcacctgagctggagcgctgctgaagtggacgaaaaactccacgccatcatgcacggtatccatgcacaatgcgtgaaatacggcacagaacccgacggatatatcaattatgtgaagggagctaacattgccggattcatgaaagtagctcacgcaatgatgggacaaggcgttatttaaaagagactttgtttagttgtatttgtatttgtggtttgcgctgctcgcctcctgtgacaggacgcgggtagcgctatttttttgagattaacattattttcttcaatggaattaattatctttgtagcattatacagtaataacaataaaaaatgctacaacccgaattaaaactccgccgcgacaagattcgcagtctgatggtgtcacagggcattgatgccgccctcattacttgtaatgcaaatttaatctacacctatggctgtgtagtcagcggctatctttatctccctcttcattcaccggcactgctgtttttcaagcggcccaacaatatcacaggcgaacactcgttccccatccgcaagccggaacagatcgtcgatattctgaaagaaaaaggtctgcctttgcccactaaactgatgctggaaggcgacgaacttccttataccgaatatgttcgtctggcaggtttgttcccggacgctgaagtcgtgaacgggacaccgctgatccgtcaggcacgcagcgtgaagacagctatcgaaatcgaaatgttccgtcgttcgggcatggcgcatgccaaggcatacgaacagattccgttcgcatattaccctggaatgacagatatcgagttctcgatagaaatcgaacgtctgatgcgtcttcaaggttgcctcggcatcttccgcgtgtttggccgcagcatggaaatcttcatgggaagtgtgctgaccggagataatgccggttatccttctccctacgattttgctttagggggtcgcggactcgatcctgccttgcccggaggcgctgacaagactccgctgaaagaaggacaaagtgttatggtcgatctgggaggcaacttcaacggatatatgggcgatatgagccgtgtgttctctatcggcaaattgtcggaagaagcatataccgctcatcaggtttgtctggatattcaggaaaagatcgcttcgatcgccagacccggcattccatgcgaaatgctgtataacactgcaatcgaaatggttacccaggcaggttttgccgataagttcatgggaacgggacagcaagccaagttcatcggtcacggcatcggacttgaaatcaacgaagcgcctgtacttgctccgcgcatcaaacaggaactggaaccgggcatggtctttgctctcgaaccgaaaatcgttcttcccggtgtaggccctgtaggtatcgaaaactcttgggtagtgacaaacgaaggagttgagaaactgactaactgcaatgaagaaattatagaattgtcataagggactgactaaaaagtcggttctacctctattggggctgactaaaaagtcaatagtatctctattctcctccttcgggaaggaggagaatagagatagaatcgactttttagccactccaatttgaacaagaaaagctattttacaggcttcagccccatcttcgccgcccgttccagcataaaagcatgggctgcctcatactcattggggataactccatccagaatagcatcctttatcgcacttttcaaagcaccgacttcacgacagggctgtaagccgaaagtttccatgatctcttctccactcaccggaggctggaaattacggacacggtctttttcttcaaggtctttcaacttttggcgaaccagctggaagttattcagaaatcgctgcttgcgctccatgtttttcgaagtgatgtccgcttcacaaagtgtcatcaagtcgtcgatatcatcccccgcctcaaaaagcagacggcgtacggcagaatctgtcactacatcatccgctatcacaatgggacgcatgtgcaagctgaccattttctgcacatacttcatcttctcattcatcggcaacttcatcttccggaaaatattcggaatcatcttctcaccgataaaattatgattatggaacgtccagcccgctttaggctcccaacgtttcgttgcaggcttggcgatatcgtgcagcaaagctgcccaacgcaaccagagattatccgtctttttgctgatattgtccagcacttccagcgtatggtaaaagttatccttgtgcgaccgtccgtttcgtgtttctactccctgcaaggcagccagttccggaaaaattaacggaagcagtccgcttcgttccagttctacaaagccttttgaagggataggcgaaagaatgatcttgttcagctcatccgcaatccgttcacgggatatgatttcaatccggtctttgttacggcagagcgattcgaacgtatcgtcatcgatataaaaattcagttgcgtggcaaagcgaatgcaacgcatcatgcgcagcgggtcgtcactgaacgtgatatctggatcgaggggtgtgcggatggtcttttccttcatgtccgccatgccgccaaacgggtcaaccagttcgccaaagcgtgctttgttcaggcagacagccatcgcgttaatagtaaagtcacggcggttttgatcgtcctccaatgttccgtcttccacgatgggcttccgtgaatcccgttgataggattctttgcgggcacctacaaattcgacttccgtacctttatatttcacttgtgccgtaccgaaattcttgaaaacagagatgtgcgcaccacgccccaagcgttttccaagtgcttccgccattgcgatcccgctgcctactactactacatctatatctttggagggacgttgcagaaaaatatcacgaacgtaaccgcctaccacgtaacactccagtccgagtgcgtcagcggtttcggcaatgtgtccgaagatcggttcgctaaaatactgtttcagttcctcttgagtcaactctatcatctttttaatgcttaacgactggcaacagacagttaaatagttgatgaaaacaccggtcgggcggtccataatcatcaaacacttattgccaatacaagttttgagggggcaaaattacaaaaataagggatatatttgtatttttgtcgctataaagtaaacgatgaacgggcgaggaacggtaaacggcaagtaacacgaacggcaaaccgcaagtaacgaacagttggcggtaagtcgtgaacactgcacgtcccatctccatcgcaaatcgtctaatagtaaaatgtaaatggtatgatgaaaaaactgattatcttcttttgcggcacgctggcactgacagcctgcggaaacggcatcgagaaaaaagccaatgaaaaactgacgattgcccgtgctgcctacgaacgtggcgactacgaagaagcaaagacacaaatcgacagtatcaagattttgtatcccaaagcattcgaggcccgcaaagccggtcaggaattgatgctggatgtggaactcaaggctcaacaagagattctggcctttctggacagtgctctccaggcaaagcaagcagcgtttgacgccatcaaaggcaagtacaccctggagaaagatgccgaatatcagcaagtgggtaactacatatggcctacacaagccatcgagaagaatctccatcgttccttccttcgcttccaagtgagcgagcagggaattatgagcatgacttccatttattgcggagccggcaatatccatcatgtaggcgtcaaagtgatgactcccgacggcagttttgccgaaactccgacttcgaaggacagctacgaaacatcggatatgaacgagaaaatagaaaaagccgattacaaattgggagaagacggtaacgtgatcgaatttctgaacctcaacaaggacaagaatatccgtgtggaatttatcggcgaccgtagatacacaacgacgatgagtccgaccgaccgacaggcagtagcaggcgtttacgaactgtcgaaaatcctttccgccatgcagcaaatcaagaaagaacaggaagacgccaatctgaaaatcggatttatcaataagaaaaaagaacggaaagcgatggaagaagctgccgaagaataaaggttctttcggagtaacggctttccggaaaagtgataaaagcgctatcggagaagaataaatcaagcagtccgaaaaggataagtaaaaaacggtaagcgatgaaaatttgtgtttatcagagatagcacatttattttttcatcgcttaccgatttttatttcaattcaagagactgttctccgacttatcattaggcacaaatagtaatgatatttcattccaactttaaagagacgcagcattgttttcttgctcgcacccttttaccttggagaaacggcgtaaaccagcatcctaaaacggcgtagcctgcctacataaaacggcgtagcctgacaggtagaaagggcgcagtctccaaaggcttatttcactctcctattcaactgattattagccttctccacctttgacttacctatccgtttccccgtccctttcttttttccggcagcaggcttcgcctttccggcgaacggattgttactttttttgattggcataacttaacaaagtatcattctccttcgtaatactcgcccaaaaaccagcgggcaataaagtcccagttttcgtgcagcagctctttcccgttctcgaaagggaattgcgcttccggcagcaggtcatgttccatgccgtacttcagcagatcgaacgggcacagcccttcctcgcagaaaagttcgtacgcttcttcctcagccatttccgcattatacagcggattccgtttgtcggcaaagtagcgggctacgtccggacctatcagcaaacctttcggattagcgtacatcacgaaatccgaaaactccttcaagtcgggcaacagagcatcttcctcgtcctcccattgcagggcctgcacaaagaacagtttcaaagcctcatacgaatcgaagaacatcaacggctcgccaccactcgctttcagaaagcgttccacattcacgggcaactgatcgcccggcgaggcaacaggcaaagcagtccgctgcttctccatcagctccgattccatcagccagtctccggcaagtccgtcgctgataggcgctttctcgaaaacatcttccaactgcgcatagatcacatcggcaaactccagcaagtccgcatccaagggattctccacaccgtcaaagtcatcgcctaccggcgaattaattccccacagcaagaaagcgatatcctctttattgatctcgtcggtgagataaccttccgacaattcataaaacggcaggtaacgtccgtaactccttttatgccaacggatgaactggcgccagttgcctccgtccgtcacacagtcttccagataaagagtcagcatcagagtcacctgattctggctttcctgtgtctccgacttatataaataagattcgctgacgacaggcaataaaagattggcaaattcaagataccagtgatccgtcgccaacacctttgcacggccatgaagatccagccatgctttcatataaattttcccttgtttcattattattctgttgcttgttttagtttctccacgccctattacctattacctattacctattctacagtcttttcaaagccagttttattactttctccacgggagcatccggttcttccttcaagatagccagtaccactttctgcgaaggcgcggcggcaaagccaagcatggtcagagcggctaccgcttcctcctgcacttctacgctggcagattgcagcagcattccggcagaagcgcttcctcctgccacggtggctcccatcgtctttatcttgtctttcaggtcgacaatgacacgctgcgctgttttcagtccgatccccttcaccgttttcagcaagttcgcattttcggtgctgatcacattcaccagttcggcaggcgaaagggcggagagaatcatacgcgccgtattgcctccgatgcccgacacggaaatgagtagcaggaaaatctcccgctcctgcttgtcggcaaatccgtagagcacatacgcgtcctcccgaatagcttcatagatatataacttacagtttttcttcccctgaatagccgaataagtattcagggatatattggcggcatagcctaccccgttacagtcgattactgcggttgccggactaagttcggcaagttcgcctcttacatattctatcatagtgtgagcaaagataagacaaattcaccacagatgaaaagactttcgcaacatttccgcctcgcagtcagaggtgaaaaaattaaaaataatgcaggcagtaaacaaaacttcctagtaatttgtttacttttgtggcagaattaaagaaaaatgttcatataaaaccaataaaagaatgaaaaaagtaagagcagctattgtcggttacggcaatatcggacactatgtacttgaagcgctacaggcagcgcctgatttcgaaatagccggagtagttcgtcgtgcaggagcagagaacaagccggaagagttggcaaactatgcagtagtcaaagatatcaaagagctggaaggagtggaagtggccatcctctgcacaccgacccgcagcgttgagaaatacgcgaaagaatatttggcaatgggaatcaacacggtggacagcttcgacatccacacaggcatcgttgacctgcgccgcacgctggatgccaccgccaaagagcacaaagccgtatccatcatctccgcaggatgggatccgggaagcgactcgatcgtacgcaccatgctcgaagcaatcgctccgaaaggcatcacttacaccaacttcggtcccggcatgagtatgggacacaccgtagccgtaaaagcgatcgacggagtgaaagccgccctctccatgacgatccctactggaacgggaatccaccgccgcatggtatatatcgaactgaaagacggatacaagtttgaagaagtagccgcagccatcaaggcagacccttacttcgtgaacgacgagacacatgtaaaacttgtgcccagcgtagacgcactgctcgatatgggacacggtgtaaatctgactcgcaagggagtttccggtaaaacgcagaatcagctgttcgagttcaatatgcgcatcaacaatccggcactgaccgcacaggtacttgtgtgcgtggcacgcgcttccatgaagcagcaaccggggtgctacaccatggtagaagtccccgtcatcgacctccttccgggcgaccgcgaagagtggatcggacacctggtataatcttttatccgcataactgaaataaaaatagagaaaggagacacacctttctctattttttttatctttgtcggagaagacaaaacacacccgatatgaaaagactattcatattctcaacatttctgttatgcttgctatcgactaccttttcacagcagtccgataacacgatcaaaccgaatctgaagtacggaaaaccctccaaggaagagctcaccatgaccagctttgctcccgacaccaccgcaacggcgtatgccgacatccagataccttattactccaacggacgcaatccgacactgaaagaaaacgtcagccagcttgcgttattccttgatttccgaaaacaagtagcaaaacaatttaataacaaaattataataaagagaatatgaagatatacaaaaagaaagaacttcccagacatgaggaagaagagttttcagtcatagtactgacttgtgacgaacacggagaaaccaatcttgggttttataactttgacacggaagattggagttttctttcggaagctgaccaaagttatagagactctgaatttgtatggatatacccaccagccaatcagatgaaagagtttttgataaaatcaatcaaagctgaacgcgaatcagctccaccttcatcgaaggaaaactggtttagaaagaaaacccaacctattaaaaagaaaatcactctggctttcaagaaaaaataaaagtgtacctttgcggctctaaccaaagccgaaaggaaacattggaaaataaaagatacaataacgtcgaagaatgggcaaacacgctcagtcacggagcaggtatactgcttggagtcatagccggctatttcctgctcgcgaaagcggcggcgggtgccgaaccgaagtgggcggtagcttgtgtaaccgtctacctgtttggcatgctgtcttcttatgtcagctccacctggtatcacggcagccgtccgggtaagctgaaggaattgcttcgcaaattcgatcacggggctatctatctgcacattgcggggacgtacactccgtttacactgctcgtcatgaggcacgcaggcggttggggatggggaattttctcttttgtctggctgtcggctatcgtcggttttatactgagtttcaagaaactgaaagaacacagtaatctggaaaccgcttgttatatagctatgggagcctgcatcctcgtggctatgaagcctttgatggatcatttagcagagatgggagccggtccggctttttggtggctgataggcggaggagtttcgtatatcatcggggcagtgttctattcgctgcgcaagccatatatgcacgctacgttccatctgttctgtttgggaggaagcatagggcatatcatagcgatctggctgatattgtaagtaaaagaaagccgtcaggcagagttcatcatttcaatacgatgcttcatcattcaacacaaaaatttcttccaccggaaccccgaaataacgtgctatcctcagcgcaaggacagtagagggaataaactttccggtctctaccgtattgattgtctttcgggttactccaatggctacagccagttcttcctggctgatattcttcatcgccctgtagacctttattttattgagcagttctttattttccatctttatagggattatacagaagcaatcttcttatttctgagaaaagcatagctaccaccactataaccagagcacccatacgtaccgagagattaaaaaaatctccaaagcaataaactaataatcccatttgcatagctgcataaaagcctgctgtcaaagccttagaattatagtccgaatatatttcactatctaatgctcccattaatttcttatctttctttattctctccaaaatatcggaagctcttatcgctacaacgacatacagcaaaactgcaaatgcaaatatataccatgtctctcccaaaaatccctttctgccagtatcaagacaaaatgtctcccacattaatactcccataaacaacataccgacaatcgtccgcatcaaaagagcattaaaccttttaatctccattttctcaatcgtaatattttccataaccatagaatttagtccatattcttatttttaagtttcacccataggttccaaaaagaaacctttaggttacaaatatagatattaaaaactatattccaaccaatcatccatctattttttaattcttccgtttttgttgaaccaaacactccctttcattcgttatataaatagagactctaaaactgcaagaaccatgaactgggaaaatcacctgatcaaagacctccaatggtccaatgagattatcaacagagaagcgaaagaacgtgtagcacgtgagatcgccgccacagccaaaacaggcgatgtgataggggccggctccggttccaccgtctacctcactttgtttgagctggcaaagcggattcacgaagagcacctatatctggaagtgattcccgcctctcaggaaatctccatgacttgcatacaactgggcatcccgcagaccaccctttgggacaaacgccccgactggacattcgacggagcggatgaggtagaccccgaccgcaacctgataaaaggacgtggcggagccatgttcaaagaaaagctgctgatcagaagcagcggaaaaaccttcattatcgtcgatcccagcaaacttgtcaatatcttgggaagcaaattccccataccggtagaggtgttcccgcatgcactgtcatacgtcgaaaaagaactgcgccgactgggtgcctccgaaatatcactacgccccgcccacggaaaagacggtcctattttgacagaaaacggaaactttatccttgatacccgtttccattatattgacgcttcgctggaagaacagctgaaaacaatcacgggcgttattgaaagcggacttttcatcaattacgacattgaagtagttgtaaccagataaaaaccaagcatagcacataggaaaatcacctttttaacatttcacccttccttacacccggtctatctttgcagccgacttaaggaaccgactattctgcactcaataaaatagtgaaagcactattctcccttctttatctcatactatcatttatcaataaaaacaaaaaaacatagtatggaaaagcaaagcttaccacaaaccgaaaatttacaatttcaattttctttttttagaaatacttggagcaaggagtctaccataatcaccctgcacaacctttatctgcaaaccatcggaacactttggaaagcacagaccgaatgctaccgcaaactacaagaccgtcccgaccgcagcaatgaagccaaaatggtaaaagacgccatgcctgtcgtcatcatcgagggcatctgccgcccgcattgcagccatgccgcagccaatctggaaaagatgagccgactagccatgtacgacctcgaccacctgaacgaacggacatctgccgtcaaagcccttttccgtgctctcccctacgtggcctacacgcagaccagtatctccgacagaggcctcaaagtcgtcgtatttctcgatgcccgcaccccggaagagtatcctctcgcctacgccatctgccagcagacactggaacgcatcgccgggcatccgtgcgacgaacaatgcgcccgcatcacccagccctgttcttgcgtatgggataccgatgcctactacaatcccactcccgaaccttatccgtggagggaagaactcgacaccgacccttcgttgaccaacctgatcaaggataaaagaaaccttccgggcagcaacggcaccccttatgccaccagtaacggctcctcctcccccttccctcccgctaccgaagcctgcggatacatcgaaaccttcgcccgtaacttcacccattaccacccctggcagaaaggcaaccgccacgagtctatgctagcaatgggaagaagcgcacgacgtaagggattttcaaaagaagaccttgaaaaattaacatctgttatgtcagtagagatcgtgagaaacggctacacgctgcaagaactcagaaaagacttatcagctggatatcaatacgttgatctatcttatgcaccccaagagacccacaattcactgccaacactgacaactgacacctttaggcctgtttctgtgggaaatgaatcggggaaagaagaagagttgtccataaaaaatgaagaattacgaggatctactccctgcattcctaaccaagtatacgaccatcttcccgactttctgaaaagagccatgaaaccggcacgcagcaaacgcgaacgcgatatactgcttctaggactgatcgccaacctgagcggatgcctgccacaagtccgcatcagtttcgaccagcgtccttacagtccgcagctctacaccctgatcattgctccccccgccaccggtaaaggacttctcacactggcaaacatgctcccacgagaaatcgagaattatctgaaaggagaaaacaaacggaaaaaggatgcctacgaccgtgaactcacggaatgggaacgaaccaaccaacaaatcaaaaaagggacgaaatctacagcagcctcccctgctcccatgcccgaaccaccggaatattaccacctctgcggtgcccccagcacttccagaaaccaaattatccgccggctgaaaatcaacggagacctcggactcattatctgtgctaccgaattggacatgatctccggcgccatcaagcaggattacggcaagcacgacgatgtgttccgtgccgcctaccatcatgaaccggtagccacggactataaggtagacggcgaactcatctgcgcagaagtaccgcgcctggcactctgcctgtccggcacccccagccaactggccaactttatccgctctttggaaaacggactttactgccgtttcggtatctacacctgcggagcacgatggaaataccgttcggcggcccccatcaaaggacaggaagattatatcacactctacaagggattcggcaaggaagtattggagatgtacttcttcttccaacaatctcctacggaagtcacgctgagcgacagacaatgggaggaacataccgcctacttcgactgtctgctcaacgaagtggccagcgaacaagcggacgcgccgggctctatcgtactccgtggcgcactgatggtggcacgcatagcttccatcttcaccgccctgcgcaagtatgaaggtgccatgcagatgaaggaatacatctgtacagacgaggattttcatgcctccatgcagatcgtacaaaccatcctcaaccacagcctgctggtcgcctcctcactgccgggagagaaaatgaaacctcagcctatgcagtcatacttccgaatccggtcggtcgtagagagcctacctaggatttttacttacaaacagattaaagagaaagcactgacagaaggtatcagcgaacgaagtacctgtagatatctaaaaagcctcatcgagctaaaatacattgataaacaaacagataaatatatcagaataaaagaattcactgacaaataagcgctaagtggcagttggcagtggcagtaacggaaaacgcccgataaattggtatagaaaacgtacatcgaagtaacgacagagttcagaaacgtaccggaaacaagtacaagaaagaagcaaaggttgtacaagaaccgagaagtacaagtacttgaatcagggaaaagaagtactgaaactgcctccatcaagtactggaaagaagaaagacatatacatgaagagagaaagagaagtacaacaatctgctgaatgatatactggaaaccggaagtagacgtatgaacagcagcagagataaagaacttcattctctcttttttcaaggctcgcccaaatgacggacaatctgttccacctcctgacgcaggaaacgatgccgccgcacattatatccgatgccacccaacgcctgcatcaacggctggcattgcttgatccatctcatcagtgttttaagagctgactctgccgaacgtcccggacaataaagcagagccagctctactttgtcataggctctcatttcaaactttttctcttcaattaattctttcataatctcattttattagcattttataatggtataaaggtactaataaaagttcgttttgtaaaataataagcagattttattgggatgaatacagacttttccggataaaaaaggatatcggcggacacctgcggacaaatacagacaagcaaagaaaataattagaacagggggagcgattaaccaataataagtagtatctttagcggaacaaacgaaatcaaaatggaaaatcaaaaccatgcattcaactatgcatatctactcaaacaagtaaaagcaagagtactactagcacaaaaaaaggcgatttacacagccaatgaagaaatgctttcaatgtattgggatattggcaaactactgtccgagagtcaaaaacaaataggttggggaaacaatgccctggagaagctcgccaatgacttgaagaatgattatccggagatgaaaggattctctgtcaggaactgccagttcatgatacagttctataatgaatataatcagcaacttacaaatacgaaacgggccgtttcgtatttgaacaataatgaagtagtcctacctatcagcaaattaggctggtcacataatataaccttaatgcaacgcactaaagacataaaagcccgctactggtacatgatccaatgcctgaaaaacggttggagccgggatttccttatcgaggcaatcaagcaagactattaccattctcacggagcattggctagtaacttcgacaccactcttcccgaaatacaagccaagcaagtaaaagagacattaaaagacccctatatttttgatatgcttacgttcaccgaagagtacgacgaaagagatattgaactgggccttataaaacatatcgagaagtttctcgtcgaaatgggtgcaggcttcgcctttatgggcaggcaataccatatcgaagtatcagaaaaagatttctacattgacattcttatgtacaatgccttcatgcatagatatctggtcgtagaacttaagagaggagaatttcaacccgaatatatcggcaaactcaatttctattgctcggctgtagacgatatcctttgccgggagggagacaatccgaccatcggactgctactctgtcaaaacaaagaccagattatggcggaatatgccttacgggatgtacataaacctataggaatctccgattatgaacttggtcaagccctgccgaaagatatcaaatccggacttcccagtatcgaagagttggaaaacaaacttagccgggacctacaagacatagacaataaagaataagacatagcataacatagtcctaaaccccaatcaggaacgaatcgttccattccctgatgtgaactgaacagtattattcagctcgcatcagggaatttctttttaatcccggcctcaaaccaccacaagaacagacatccgcagacatttccagataaaaaaagacatctgcggacacctgcggacaaatacagacatcgcccatccccactaccgtacttttgtcatgtcacaagcaaggaaccacctgtgacgcaacactttattatcatttattcaagaacttaaaaccagtaaagaaatggcaaaagtattttcattcaccagcgtgctccgcaagaacatgatggaaaaagacaaaccggacctatattacgctctcgccaaatcgagcggagagatcgatatagatgaaatggcggaacgcatccagcgttcgagtaccgtaaactgggcagacgtagtgtgtgtgctgcgtgccctgcagacagaaatgatcgacagtttcaagaaaggagagatcgtccgcctggggaatatcggttcgttttatgtcactttgcgcagcaacggcgtactcgtccagaaggacgtgaaagaaggattgatcaaaggtgcccgtgtccgcttccgccccggaaaggagattaaagacgcactgaaaacgctggacttcagcaagtacaaaccggaaaacagcgaaggagacaagaccgatccggaaaaccccaaacccaaaccggatcccgatgacggtgacgaagaagctccggacccaaccgtataaggcaatcataaaccggggatttaccaaatctgacgaatcatgagaaagatcgatttaatcgtgatccactgttccgcaacacgggtggaccggacactgacggcctttgatctggagacgctgcaccgacgacggggattcaacggaacaggttatcactactatatccgcaaagacgggacaacactcctcactcgtcccatcgaacgcatcggggcacatgcaaaaggattcaatgcgtcgagtatcggaatctgctatgaaggcggtctggactgccggggacgcccggcagatacacggacgccggaacaacgtgccgccctccgcctgctggtgcatcaattggagcaacgtttccccggctgccgggtgtgcggacaccgggatctcagtccggatctgaacggagatggggagatcgaaccggaagagtggatcaaggcgtgtccttgctttgaggtaaaggaaagcctgtgaggacaatataaatgagcaaaggtataaagacgttttcaggaagtaattaatcttttaaagtatcggaaaggaggtgtgtaaattatggcaatgaagaaatccctttgggatatgattctgaaagtagtcatcgcggtggcttcggcagtagcaggcgtgttgggcgctaatgcgatgagtctgtaagaaagtcaaaaatgaggtccgccaccaagatatctgtttcagctgccacagcagtatacagaaatatttgtggcggacttagtatacaaaaatcaataaactaataatgaaaatgaaatatatattattcaccatagcttttctattggcaagtaattgcctgaaagcgcaagggcaatttgagaaagtaattgggttgacaggggcacaaggctttccacaaccgggtgtcagtaatgccaacactcaaggtaaaatacctgtcggactatataccggaactccgaatatctctatcccattgtacgaatttaagttaagagataatatccaacttccaatcaacctcaattatcatatttataatgtaaaacccaacaacctacccagtgaagtgggattgggatggagccttgaatgcggaggatgtattacccggataattaaaaatgagccagatatttcttatgaaagttctagcaatgaatacaagcctataaccaccgaagctgatttattaaccacagcagacattctagtaagagtatccggcaactatattaatacccaagacgagtatcaatttaactttctcggttacaccggaagctttatgtatagtcaagaaaagagcaagtggatggttcaatcagattctgacatcaaaattgaatttacctcgaatacttacaataatacccgttctcaacttaccagtccactttctcaattttacaactattgcagatcagaaggaaccggatttaagaaccctttatcatgttggttgattgattcgtttacactgaccacgccagacggttataaatacatatttggaggaaccgataaaacagattacaatctacctttcaagggattcttaaaccttcctgctcccatcacctggcatctctccaaaatcataactcctgcaggacatgaaatagaattcacctacgaaattatgccgtttcaaataaatggaaatatgtctttctgtataagcttggatgctctattctggcaaacagcaatgagttatgattatgaattactagcccctgtacaacttgcaacagtcaaagatgtaacagacaataaaatacttgcccggtttcattactccccaagtacacaattaccctatgactcacagtatgcatgggaaacctgtatggaccatgggccagctacattttttacaaaagaaaagaatttcacgttaaacaagctaaactccgtggtaatattggataagataaactatcagtttacttacactaatagctccactgagcgattaaaactgaaaacactgactaaaacgactccatcaggaacccaatcgacctattcactaaattatttccccaatcacctacccggatataatacaggacactatgacaacctcggattcaataacggtgaaaatttctcatactatttcagcaaagagttctttgaaaatgcaatttttgctgacaagcagatagccgaaggcaaagagtataccaacaaaagaatgggagacaagggaggatttcgtgtgactgcagaaatgctaaaatccatcacataccccacacatggaagaacagaattcatttatgaacccaacgtcatatccagtatggtgtcagcagaccggaaaacagtacaaagtgcccatttaccttatccaggcactccagattatacatatccgggaggtctccgtatcaaagaaatcaacaactacgatagcaatgatgaactactgacaagaaagcactattactacacaaaagaattcacaccgacaacaaagggaggtgtctcttccggtattctatctttcactccacaatacctttggggttggcagctatacaatctcctcaaatcacaaaacggaggacccgaatattataccttgaatgccatcatgtctcaagcatccaatccgctctggtacaacagtcggggagagtatatcggatattctaaagtcatagagtgcaatgaagacaaaaatgggaaactgatagacggatatactgtccatacattcagcaatttcggaccaggttatatggacgaagatcccatagctatgttgaataataagttctcccgtgaataccctcctcatgtcggtaccccttatagtccatacactccatgttcatcaaacgcactaaagcgcggaatgctcttaagtaaagaacaattcgactgtgccggtcatgtgaaacaaaaagaactattcgaatatactcctatacagaaagattccatactcatcacggagataaccactactaatgtcatggactataattcagacgaccctacactgggattcctgaggtttgctttcggaggtacctactatcaaaaattctacagcaacctactttcggaaaaacggactatcacttacgatgacaatggaaacactattgagtataaagataaatacgaatataactccgtcaacaaacagataaagctgaaaaccagtgaagacggagccggaaatgtatacgaagaaaagacgcgatacgtgccggacatgctgatatttccatttgtacctccctatagttctttctaccagatgaatcagctacacttcaccgactatccattggaagtgacaaagataaaaaacggaaaagtaactgagaatgagacatatttctataagttactgactgcagacagcaaaagcttagtgaaagacaaagtatccatactgggaaaacatgctgatgctgcaacataccaaggactccataatgtgggcaacgagttagtagccgatgtttctaatattcccgcaaccacatacctggcatacgactcttacagcaacccgactcatatccgtaacgaaaaagacaaaacagaaactgtctacctgtacggatacaaaggcaaatatgcaattgcggaaatcaagaacagcgattacgaatcagttacaggactattggggaatgatcttatcaaaagactggcagacgcaacgaagcccagctattcagacatgcagaaagttgaaaatttgagaacgcaattaccggcatcatttatcactacttatgaatatatcccatacataggtatcagcaaaattagagatcccaagaatgtttctacctattttaaatacgatgattctggacgtctgatagaaaagaccgaccataagggcgaactgattagttcatataaatattcaaacaacctctaaagagataaatttatgaaaattattatttatattacagctttaatatgcagcttactcgccagtcctgtattggcgacagaaaccgggcaaatatccatgaccgacatggggctaaaagtcacaccttctcctgaaagtactctctacgaaggagatacttggatgataacagcaaggaacaactttagcttgaacgaagcagaaatcaaaaacttcgttccttcacgcatatcagaagaattgcgtccgtacgtgagacttttcaaagttgagtttacttctaattcagacggtatatgcaacctttactttcacataacggccgatccgacagatacgatacggttcgttatcaaagaatcccctcaggattttccgatagaaataatgccagctgaaagtagacatggagagatatctttatccgatctgggattgagagtaacgacttctatagattcacatctcgaatacggaggtcagtggatagtaacgatggaaaacaaaaatcacttattcactgcagaaatcgaaaggctcgtgccttcaagaataacggaagatttaagaagatgtttaaggctcacaggggtaggaatttcagacatatcatccgagttcgtcgtactcttttttgatgtaacattcgaaacaacatttccagtacacttcattatcaaacagtcacctcaaaacattccaatagaaatattacctattggaagagacaactatatttccacaacgaattatctggataacacaagaagtgggggaagaaaagaaattacttactacaacggtctgggatatccatcgcagaaaatagaagtgggtacttccaataagaacaagagtatataccatccgatcgtttatgataacttgttaagagatgatgccaaatcgtatttgccatacgcacaaggttcgaacacagaaatgatagactggaagtttaccgaaagtctgcaagatttctatgcttttaactataaggaatatacttatcacttttcagaaaaagtctacgaagattcacctttgggaagagtacgggaagtgtatggtcccggaagcgactggcgttcgcaaaaagcaagtaccaaattcagctatctgagtaacatagccggaaatgatacgctcaactgtcttcggtttgaaatgacagaaaaagataaccaaaacatggagctgaaagtagccggcaattgcaaatcttccgagctatccgtcacccgaaccgaaaacgaagatcgtcaagtgacattggaattcaagaataaattcgaccaagtagtacttagccggcaaattgagcacaacaacggcagtaagacgaataacgacacttattatctttatgatgagttcgataatttaaaagcggtgcttccacctatggtatccgcccaactcgtaagcggtagcagttattcgagtcaaacttccgcatccttagctcaatacgcctatctctataaatatgatatgcgtaaccggtgcataggcaccaagttaccgggctgcagttgggagtacaaagtctatgacttggcagaccgccttatcttctcccaaacaggagaacaacgaaaaagaggtgaatggcaatttgcattgcccgatgcaatgggacgcgaatgtatcatgggtatttgtaaaaacgccatagacccattcaacaacccgatactgaatacatgcgtcaaatgtgaacgtacggacaacgcttctcttctcggttattccgtaaccggagtcgcactgaattcagccacagtgcttaccgccaaatattatgacgactatcagtttaagatgcagaacggcaccctgatttccaacagcagtttgaattatgaagcaaacagcgagttcggagaaagatatacgactagttcgcaaggcttgcagaccggaaacgcgacagctcgactggacaaaaacggatctgtgacaggatacgactataccgttacttactatgattataacggccgtgccattcagataaaatcgaccaatcatctgggaggatacgaaaagacatacactgcttacaactttacgggacagcctgtgcacaccaagcatatccactccaaaagtaactccgagctgatcgaagaaaccaaacacagctacaatcacgcaggacgtttgtctgaaactgtacaaatcgtaaatgaaaaggactctacgaaaatgagctatctctacgatgacttaggcaatattaaaagcttaacccgaatagacggcacttccacactgacaacgaccaatacgtataatatccgtaactggctaacgtctatcgaaagccctctcttctctcaaacgctacattatactgatggtcccggcactccccagtatggcggaaatatcagtagcatgacgtggaaagcaaacaaagagtcaatcacccgtaattaccaatattcatacgataagctcaacaggctgaccagtgccaattatagtgaaggaagcaattcgatgacgaatacaaatcacttcaatgaacaagtgaccggttatgacaaacatggcaacatcacaggactgaagcgttatgggcaaaccggacaaagcagttacggattaattgacgacctatctcttacttacacaggcaatcagctcaagaaagtgacagacagcgccacaagttcagcatacgcgaatggtttcgagttcaaggacggtgtgaatctggacacggaatattcctacgacgaagacggtaatttaacaaaagatttgaataaaaacatttctgatatccaatacaatttcttaaatttaccacgtcggatacagtttaaagacggtagtgaaatttcttacctatatagcgcagacggaactaaactccaaactacacatataatcgcaggaaacaccactacaaccgactactgcggcaatgtgatctatgaaaatggaagccgggacaagctattgaccgaacagggatatttctctatagcagataaaaagttccactactacatccaagaccatcaaggaaacaacagagtggttgccagccaagatggaatgatagaagaagtgaaccactattatccgttcggaggaatattcgcttcaaattcatctgttcaaccttttaagtataacggaaaggaactggatacaaagaacggattgaacttgtacgactacggagcaaggcagtatgacccggtattgggaagatggcatacgatggacctgatgacggaaaagtactataagattagtccatacacttactgtttgaacaatcctatcctattagtagatcccaatggaatgtggcccacatggggaggaataagcagaggattaagcaacgtctttaagggtactctaagttttaccaatggagctgcacgggctatggcagataacatactgcttggacaaacgtcactccgtgaaaccggaatatacagcaacgcatctgcctacaacgcaggacaggatgttggtgatatcataagtatttttgcaggagccgcagagattgttaatggtttcgaagaagctgcaggaggaatggcactcagtccggaaaccgcaggaatttctttgggggttaccgcgaaaggcgtgtatgatatcactcacggttcattgatgggaacaagtggattcatgaagctattctccaaaaaaggaagagttagcgaaggtagtaataacggaagcgggtattcaaagtctagcgggaagaatgaaaagcattcgaatattgataaaagacaacaagctgcaaatgattatagtacagcaaaagagaaatatgataatttaaaatctaaaacaaataaaactgcgaaagagaaaaaagaattagaaacattgaaaaaacaaagagatcactataaaaaacagatggattatgcaggagaccatgaccatcaaagaggtagaggaggtaattaaaatgaaactatttacatttattgctgactataaaggtgggacatacattagtcagtatgtagcaaagacattagaagaagccttgaacttatggataaataatgtcgatttttttacagataaacagttgaagtcatttaagaagaatatcaaatatggtgatatagatcctcctaccaaattaaatggtctaagtaatgtttggtgtacatgttttattgtatttagtactcttttgcttcttaatatagtagagacagtaaaaaaaacgactaataaaacatcctagcatagaacaatatattcctacattagggtagattcaagtctcagaaacaaccatgaaataaatgaaattatgaaaacatttactttcttagttaatgccaacgataagcattgctttgttcatcagtatcaatcagaaatgccgactaatgatttatttcgtgaattagttcatgacacgtctcatatatcttcaaaaatgaagtctttacttattcgtgaatctctggaatgctatcatgacaatggcccagtaaaattagactgcgtaaaaaacgtctggcgtgatttctttttaattgatgatctaatatctctttacaatgcgaatatagcaaaaaaataccacgagggatgtggcgataggaaatattacaagttaatgtacttatatgatgtaaacatgatagaaaccgacatgagcgatacagtgtttcctctatcagagaaagcaacctttactttcattacctatattcgtaattacaatgcctcatatcagtttgaagtgacaacgttggaagaaggacttatgctatgggctacaaacatagacattttgaatcgccagcaacggaaggttctgctgaaatacattcaaaagtctaaaaacaatccgatagcagtagaaggagtaaagaatgtatggagtacatcatatcggatattccgtccgttactgacattgcatattgttaaaacggtctcttgataaaagtcaccgactgaacaataactattagattattaccctggcatgaaactaaaacatttacatgtcagggtattttttcttggctaattctaaaacaaataagagcaggctcagcaaacgcaagggactcacaatacatacgcatttgccggtctactcttatttgttacttcccggacgttctcaatgaaacatccggaagattagaactcccttttcaggttccgaagcagttcttctttcctcgctttatacttcttggaaagaggattgtacgagtaaaggttggtatgtttcaaacgtatctcgtctgtctgttcctttcgccgctcttcccgctcttccacatcatccggatcttcggacttacgtcttgtacctctcctgctaaacaactgaaacttggatgtaccccgaagctgacgaatcagcatcttgataatccggacaataatctcttgttcctgttcggaataaggcctatctactgtctctgtataggagagataataaactttcagttcttcttccagctcttgcaaaaaatgcatccgctcaactctggaaaacttctttctaccagtatgcaaatcttttaaaatcttcatttagtctatctttttttaagtctgataaaagcgtgagtcctttaataagtacacttatggggcatgggacacttaaaagagagtccgactatttcaatataacagagaagaaaaactaatatttcctgcaagaatcatttcttaaaagttatccaaaacggaaaactttctgtatcaggcagaaagaaaagtttcccgaaatttaatgttaaatcctatccaagctatcacaatatcctttatctttgtatccgatttcggaactaaaaagaggtttagtcaatgagggaacgctgtgcaaatcggcgacagtacccgctgctgtaattctctgtgaatccgcacactatgtcactgcatcggcagatgtgggaaggcgctgcgggggagggataagtcagaagacctgccggagtcaaataaacatattattaatcactttcgggagttaaagttatgaactacgcggaaatttgtatcatcaaacgggatggtaaaagagaagatttctctattagtaagatcaagaatgcgattggtaaagcattcagtgcaacagggattcagaacgagcagcaactgattgctgacgttacgatgagtgtgatcagtcagttcactaaccccacgatcaccgtggaggaaattcaggacttagtagaaaaggcattgatgaaggtacgccccgaagtagccaagaagtacatcatctaccgcgaatggcggaacacggagcgggacaagaaaacccagatgaagcacgtgatggacggcatcgtcgccatcgacaagaacgacgtgaacctgagcaacgccaacatgagcagccacacgcctgccggacaaatgatgacattcgcatcggaagtcaccaaagactatacctataaatatctgttgccgaaacgttttgccgaagcgcaccagttgggcgatatccatattcacgacctcgattactacccgacaaagacgaccacctgcatccaatatgacatggacgatctctttgaacgtggcttccgcaccaagaacggcagcatccgcacaccgcaaagcatccaaagttatgctacgcttgccaccatcatcttccagaccaaccagaacgagcagcacggcggacaggcaatccccgccttcgacttcttcatggcaaaaggagtggcaaagtctttccgcaaacatctggcttcgttcatcaacttctacgtggcgatggaaaacggaacacaggcggacgagaaagcaatccgcaccttaatcaaggaacatctgccctctatcaaatcgaccgaagcagaacgcgaaacattgcgcatcgccctggtagccctgcaaatcattattgacaaggaacacctgacacgcatcgcagagaaagcgtaccagcagacaaagaaggatacgcatcaggcaatggaaggctttatccacaacctgaacaccatgcactcccgtggaggtaaccaagtggtattcagctccatcaactacggaacggatacttccgccgaaggccgcctcgtgatcgaggaactgctgaaagccaccatcgaaggactcggaacacgtggtgaagtccccgtattcccgatccagattttcaaagtaaaggacggagtttcttactccgaaaaggacttcgagaaagcgatgaaggcggaaaacatcgaagacgccatgcggggaacttacgaagctccaaacttcgacctgctgctgagagcttgtcagactacatcgaaagcgcttttcccgaacttcatgttcctggacacgcctttcaacaagaacgagaaatggaaagcggacgatccgaaacggtatatctacgagttggctacaatgggatgccgcacccgtgtatttgagaatgtggcaggagaaaagtcatctctgggacgcggaaacctttcattcaccacgttgaacatgccacgcctcgccatcgaagcacgcatcaaggcggaaaatctgattgagggtgaacgcaacaaggatgccatcgaacagaaagcgaaagagattttcatggagtcagtccgcaatatggcgactcttgtagccgatcaactgtacgagcgctaccagtatcaacgcaccgcactggcacgccagttccccttcatgatgggaaatgacgtatggaaaggcggcggcgcactgaatccgaacgagcaagtgggcgatgcgttacgcagcggtacactgggcatcggctttatcggcggacacaatgcaatggtggcactttacggagaaggccacggacacagccagaaggcatgggacacgctgtacgaagctgtaatggaaatgaacaaagtggtagacgaatataaagagaaatataacctgaattattccgtacttgccacacctgccgaaggactttcgggacgtttcaccaagatagaccgacggaaatacggtaagatcgacggtgtgacggaccgcgactactacgtcaattccttccatgtggatgtgaaggaaccgatcagcatcaccgagaagatcaggcgcgaagctcctttccacgccatcacccgcggtggacacatcacgtatgtggaactggacggggaagctcagaagaatgtacgtgccatcgcgaaaatcgtgaaggtcatgcacgacgagggcatcggctacggctccatcaatcacccggtggatacctgtcacaactgtggatacaaaggagtaatcttcgataaatgtccggtatgccagagcgaaaacatcttacgcatgcgccgtatcaccggatacctgacaggtgacctcagctcctggaactctgccaaacgggcggaagaaaaggatcgcgtgaagcacttgtagaagttgaaagacactcatttattttttactgaagtttcgtaaattgtttccgcatggattcccctccttctggaagctaccctttatacacatctatt

SEQ ID NO: 4587 - DNA, 13685 bp, Unknown
  gut microbiota DNA sequence
agatactattgactatcatttgactcaaaacatgtttggacatgaacataaactctataacattatcgatagaactctatgtggttagatctcaatgacttatagtttcctgtcatttcttgtaatggaaactgtcgtttcccggtgagggaacggtcgttccttataatggagacgaccgttccttttaaagggaactggcgtttcctccgaggaaaccaacgcttgccccatatgatactgatgcttgatttatatgaactgacaatttagcgtataactgaatcgttgttaagccattcggcatggatacgaagaaacaagcaatcttatgctgcggcagaacatttctttgcataacctcgtttattatataacaaactaaatatatattcagtatgaagtcattcatcttaatggttataacaatggtatgtgcaatctctctggaagcgcagaataagtctttctacgacttcaatgtgaccacgattgatggtaaggaatttccgctttcttctttgaaaggaaagaaagtgctggtagtaaatgtagcctccaaatgcggactgacgccacagtatgccaaactgcaagagctatatgataaatataaggataagaattttgtaatcatcggctttcctgccaacaactttatgggacaggaaccgggaagcaatgaagagatcgctcagttctgctccttaaagtatgacgttacttttccgatgatggccaagatttccgtcaagggcaaaaacatgtcgccactttaccaatggctgacggaaaagaaactgaacggcaaagaagatgcgcccgtccagtggaattttcagaagtttatgattgacgagaacggaaactgggtcggctttgtggcccccaaagagagtccgctctcggagaaaatcgttacttggatagagcaggagtaggagcagggaaaagagacggaataagggatactttctttaattccccttcgaagttgggggtgaaaataccttttccgaggttttcttctatttcttcgatggtccagaatcgtccgccgtccagttcgtcactggggtgcagttcaccgtcgtaaacagttttgtgaacaaagacaagttctttctcacgatccgattcgaatacatagctggttagcagttcgggagtaaagtccgtgatgcctagttcttcgcggacttcccgtttgagtgcgatttctacgctttcgcccaggtcaatatgtccgccaacggctgtgtcccattttccgggctggatgtctttccattccggacgtttctgcagatataaatctcctttcgaattgaaaacgtgaagatggatgacaggatgaaggagcttgcttccgctatggcattctccgcgtgtggcggctccggtgatgtttccctgttcgtctacgatgggaaacatttcttgattattatcgcttggcatagttgtttttactttttggtttacggtatcagcagagaagaatctccataactcagaaaacggaaatcgtgcgccagcgcataatcataaattgtgcgccagtttcccttcacgaaggcggaaaccaaaagtaacagcgtactttgcggctggtgaaagttggtcaccatcgctttcactatcttatactgatatcccggagctatgataatctgcgtactgctgtgaagggcttccagcccgttcctgtcgaggtaacctaaaatcttttgcagtgcgactacaggcggaatctgatcatacttttcgtatggctgccattgcttgacgtgcagttcttcttccgtagcatcgggattttccgccaatgttactccgatgtgatacaggctttcgagcgtacgcaccgaagtggtgcctacagcaacagcgcaaccgtcatgatcgatcagctttttgatcgtagcccgattgacggagatatactccgtatgcatctcatgtccttctatctcttcgcttttcacgggcttgaaggttcctgcgcctacatgaagtgtcagttcttccagatcaatgcctttttcctgcaatgcttccagtacacggggagtgaagtgcagtccggctgtcggtgcggctaccgagccttttattttggaataaacggtctgataagtttctttatcgctctcttccgtatcccggttcagatatgggggaatcggcagttctccgaacacttcgaggatatcggcaaaggttacttccggattgtcccaggagaaatcaatccagtggctggtgcccctgcattctccacgggtagcggtcagagtgatcgggaaaccttttaccgtcatctcccgtttcagtgctccgtctttccatttcttcaggttaccgatcatgcagagccaggcagcgtgttccgtctgctggaagttcaatacataatcgttgggctgaatcggttccagacagaagacctcgatcagcgcccccgtttctttgcggaagtggaggcgtgcctgaatcaccttcgtgttgttgaataccatcaggcttcctttcggaagatagtccggcaaggatgtgaagacatcttcgcttacttcaccgtggcgatataccaacagttttgactggtctcgtactgctaaaggaaatttggcgattcgttcatccgatagtggatagttgtattcgctgatgtgaatatgtttcgggtcttctttcattctcgtttcaataaaaaaagcatcaataacccatcgattatcaatgctttgtcggtagtcgggatgacaagattcgaacttgcgaccacacgccccccagacgcgtactctaccgggctgagctacatcccgaattgcggttgcaaaagtagtgctttatttttaaatagcaaataaatagcctgtttttttccattagctgattttaggataagtttccgtttgcggaataaaaagtcctttagtccataataattctaaataatataggtggttgcaaactaacataacagggttttgtttatgaaattaagtgaatagatagtgcgtaacttctttaaaatgaaaccatatcggcatacgagacatgagagtagtttaggatagtatatttttgtatttagttttatttaatgagggggtaaatgtgtataataaaaatagagaaacgttagaagcttatgtcttaggtgatgattttaagtattttcagaatttgaagtatcttcccctaagcgtttatccttctaatattcagtctgctttggtcgtgtattgcttcagcggaaaggccaagcttaatgtatatgatgattcgcattggatacagccgcaggaattgattattctgttgccgggacaattcgtttcgttcaccgaggccagtgatgattttctgactactacgttggtggtgtcgcctacaatgttcagcgatgcgctgagcggtgtgcctcgcttttcaccgcatttctttttctatatgaggacccattattggtatcctcagaccgaaaatgatacccggcggttgatgaatttctttggaatggtaaaggataaagtgacgtctaatgatatatacaggcgtgagctgattattcatttattaagatacttatatttggaattgtttaatgcttatgaaaaggaggcatctctgatgactacccgaaaagatactcgtaaagaggaactggctaataaattctttgggttgataatgaagcacttcaaggagaataaggatgttgctttctatgctgataagttgtgtatcacatccaaatacctgacgatggtgatcaaggaagtgagcggcaaatctgccaaagactggattgtagaatacatcgtactcgaaataaaggctttgctgaagaatacgaatatgaatattcaggaaattgccgtgaaaacaaattttgccaatcagtcgtctttgggacgtttcttcaggaaacataccggaatgtcattgtcccaataccggatgagtaacttaggataatatagaagatgcctgtggggaataaaggcatatgtggggagaggagaatgggaaagggaaagaagaaatgggaaaccttttagggaatcccattctccttcattattataataagtttcaagatcagactcccatacattcgcgatagaagtcaagcatttcaaaaattgtgtctttatcagctgtctggttgatgcaaatatctccgatctctttcagtaaagtgaaattgaccgttcctgaggtatttttcttatcatgttgcataaatgcgtagagttgttcgtactgcttacagtcgaatgcgaatgaaccataattctctttgatgaattggatggtctgtcgcatcttgtctttcggaaagccgactttgaggtgtgacaggtaaagctcgcatacgattccccatgctacggcatagccatgcagcacggggcgattctcagccaatgccagactttcgaaggcatgtcctgctgtatgtcccagattcagtgctttacggatgccacgctcgaaggggtcttgctccacaatgtcttccttcacctgtaccgatcgtcccaccatatttttgagatatgcataatcaatgttattggtattgaaatccagtaattcgacccagtgtgcggtattgctgattaatccgtgctttaacatttcagcataaccggagaagaaattctgtgcatcgaggctgcgcaggaattcagtttcaatcagcacactgtctgccggagcaaacgagcctatctcgtttttcagtccgttgaagttgatacctgtcttaccgccgacggatgcgtcgaccatagccaacagtgtagtgggtatattgatataagaaatcccccgtttgaaggtagcggcggcaaagcctcccaaatctgttaccatgcccccaccaaggttgatgagcaatgagtgacgtgtagccccttgctgactcagtgccatccatacggaggccagagtctccagtgtcttatgcacatcttcggctccgatacagatttcgactgcgtctttcagaaacgatacctctttcaatgagggcagacaaagacgctgggtatgttcgtctgtgaggatgaataacttgtcatgcggacacctttcaatggcacgaccgaggcttgtttccaagctttcgcagagaatgacttcttgtttactcatgattcttttgctttttcttggtgcaaatgtatataaaatatctttttttacttacttttgtctcgttaaaacgttcaattatgaaagcattgtttcctgtattttgccgtcctttgggatatgtggtgttgttagtagctttgtttcttcttccgattttgctaatgcaagggttgataaccgaccataacctgctattttataaggaatgtacgaagctgttgatgatggcaggatgcttgctgatcatctttgccttaagcaagaatgaaagccgcgagacggaacagattcgtaatgcggcagtccggaatgcagtctttctgacttttctgtttgttttcggtggtatgttgtggcgtgttctgcaaggagatgtgatcaatgtggacacttcttcttttctcacctttttaatctttaatgtgctttgtttggagtttggtcttaaaaaagcgcttgttgatcgattcttcaaaagataattttctattaaattaaaccttttacgattctatttgtcaaaaagacattgttattactctactaatcgtaattaaggtaaatgaaaagattatcagtttggtgggtgcttacactgttatgcaccttctctatttttgcacagaataaggtgattaccgtttcggggcgtgttgtcgaatctgactctaaagagccagctgcacaggcaactattcaattgttatcgttgccggatagcgcttatgcagccggtatagcaagtagtaataaggggtggtttacgctccctaaagtgaaagcggggaaatatttgttgaaggtttcttacatcggtttccgtacgaaattcgttcctgtacaattatccaataatgtgactgaaaagaaaatggggacaatctctctggaccctgatgcagtgatgctgagcgaggctgtgattacggcggaagctcctcctgttactgtaaaagctgatactacagagtattctgcagcggcttaccctgtaccggaaggttcaatgttagaagatcttgtgaaaaaaattccaggagctgaagtgagtgatgaaggtaaaattactataaatggtaaggaaataaaaaagataatggttgatggaaaggaatttttttctgatgacccgaaagtctctatgaagaacttacctgctaatatgattgagaaagtaaaggcttatgataaaaaaagtgatatggcacgtatcacaggaattgatgatggagatgaagagcccgtcttggatttgaccgttaagaaaggtatgaaaaaaggatggattggaaatcttattgcagggtatggtagccaggatcggtatgaagggggagtaatgatcagccgctttaaagatgatgccagtctttcaattataggttctgcaaataatactaataataagggattttctgaatttggtgatgccggacaaggactaggtggaggtaatgctggttcaggtattacaactgcacaatcgttgggagtcaacttcgctaaggatactaaaaagttgcagatcggggggaatgtacaatatggacattctgataatgacgctcgtcgcaaaacctcttcagaaacatttttgggggaaacatcttcttttgctcaaagtgagaacttttcaaatcgtaatcgtcatgattttcgcgttgatttccgtttggagtggagacctgacacattgactacgattattttccgtcctaacggtagttattcacaaacagaatctagcagtcgttcttggtcaaagacagaaaataactcgcatagtcctgttaatgaaaaagaggcagcttcttcttctaaaagtcataatgcatcttttaatggtagcttgatggcttttcgaagattgaacaataaaggacgaaacttgtctttgggtgcacgtttcggatatagtgacagcgagtccgattcttattctgattcaaagactgaattcttcgaaaaggatagtatttctgatatttcgcgctatacagacagaaatagtgatagtcgtaactggagtgtatcagcttcttatacagaacctgtatttaaaaatcactttttgcagttgcgttatgaatttgctcatcgcaaacagttatcacaatcattagtgtatgatagtattaactactatccgtatcctgaatatatagagcgtgggtatgataatgaactaagtacacgtgtggagaatttctatgatactcatactgctgatgtttctgtacgtggtattcaccctaagatgatgtatagtgtaggagtgggggtgactcctcagtcatccttaagtaaaacgacaattggtccgaactataagaagaatcttccagaacagaatgttttgaattgggctccttcagtaatgttccgttatatgtttaataaacaacatgtattaatgttccgttatcgtggaagaagcagtacacctaacattgaggacctgcaggaggtgattgatataaccgacccgatgaacctaagatatggtaatccgaatttgaaaccatcatttaataataattttactctcgattatagaaagtttgtaccggaatctatgcgtagctattctgctaatttgtattatacaagtacattgaattctgtagcaaatagaatgacatatgatcctcagacgggtgctcgggtttataagaaagaaaatgtaaatggtaactggcaagcaagaggatttttttcattcaatacaccgttgaagaacaagaaatttacaatttcatctaatacaaatgcacgatttagtgatgctgtaagttatacaagtgtcggaagttctaaaaatgcagatcaggaactaagtacaacgcataatttagggttaggagaacggtttaccagtagttatcgtagtgaagtttttgatatatccttaagtggttctgttaattataatttggtcagaaatagtaaacaagaaaatagtaatcgagaaacattcgactactatattggaggtaataccaatgtaaaccttccttggcaagtctcgatttccacagatattaattgtcgatttaaagatggatatacaggtgggcttaataataacgaagtgatgtggaatgcacaaatttcgaagaattttttaaagaataattcgggtacaattcgttttaaaatatatgatatcttaaaacaacaaagtagtttgtcgcgttcgattagcgaaacaatgatgagtgatactgaatataatactttaggaagttatttcatggtacattttgtatatcgctttaatacgttgggtggaaagtcaccaaatcgacgtggaccgggtggtggacctagaggaggacatggctttggcggcggtggcagacctatgcgtttctaaattgtgactagctctgaatgaaaacgggaaagtcccgatggtaatgaacatgactaacatgacttgccatcgggacttttttgtttatccgataatttgctttatatttgttgttcagtatccatataaaaaaggagtatcctatgattgactggaacatactagttagccagatagctacggttgcttttgatatcgtttattttggagccattatcagtacgattgtcgttatcattcttgataaccggaatccggtgaagactatggcatggatactcatattacttttcctcccaattgtcggtcttgttttttatttcttctttggtcggagtcagcgtcgggaacgtatcatcggtcaaaaaagttatgaccgccttttgaagaaacctatggcggaatacatggcgcaagactgttcggatgtacctgaagaatatgcccgccttatccaacttttccagcataccaatcaagcttttccatttgagggaaaccgtattgctgtctatacggaaggctataccaaattgcaatcattgcttcgtgagctccaaaaggcgaaacaacacattcatatagaatactatatctttgaagatgatgctataggacgtttggttagggatgtactaatcgaaaaagcatctcagggggttgaagtaagagtaatttatgatgatgtggggtgctggcatgtacctaaccgctttttcgaggaaatgcgtaatgcaggtattgaagtcaggagtttcttgaaagtacgcttccctttgtttacaagcagggtcaattatcgtaaccacagaaaaatagtcgtgatagacggacgtatcggctttgtgggaggtatgaacctggcagaacgttatatgcgtggtttctcatggggaatttggcgtgacacccatattctgatagaaggaaaggctgtgcatggtctgcaaacggcctttttgctcgactggtatttcgttgaccgtacattgattacagcttcacgttatttcccaaagatagaatcttgtggaagttcattagtgcaggtggttaccagtgaacccattggcccctggaaagaaatcatgcagggactgactatggcgatcaatggagcgaagaagtatttctatatgcaaaccccttatttcctgccgacagagcaagtacttgccgctatgcagacagctgcactggcaggagtagatgtgcgtttgatgttgccggaacgtgccgacaaccgaatcactcatttgggatcgcattcttacctggcagatgtgatgcaggcaggtgtcaaagtctatttttataagaaagggtttctgcactccaaactgatggtttctgatgatatgctctctacagtagggtctaccaatgttgacttccgtagttttgagcataattttgaagtaaatgcctttatgtatgatgtggaaacggctcttgaaatgaaggagatattccttcaggatcagcgggaaagtacacagatctttctgaaaaactgggtgaaacgttcgtggaggaggagggcagcagagtctgtcgttcgtttgttggctccgctgctttaaaaaggatgcttcctttatctgatatacttttatcttatctgaaaagcgagaaattcacacttccatagactcttctttctatgaaatgcggatgatcttcaaagttattttgcttaccatgctccaatacaaacaaacctccttctttgagcagattatttttgaatattagttccggtatcgattccagctcctttaaagcgtaaggagggtcggcaaagataaaatcaaactgctctcgtccgctgttgataaacttaaatacatcgccacggataggcagacatttgtcagtttgtacttctttcattattttgcagataaacgagtgatgagccggatctttttccacactgatcacacggtcgcagcctcgggataccagttcgatactgatactgcccgtgcctgcaaacaagtcaagtgcagttactccttcttcgaaatcaatataattattaagtacattgaacagattctccttggcgaaatctgttgtagggcgtgctttgaatgtacgtggtacatcaaatcttcttcgtttataaataccgctgattactcgcatgttaataaggcttgcatgtcaatattgttggcaggattcataatgaatacctgcagaatgaattttttcagttcgttcatcaatgtctctttgtccgacagagtgcctgtcagatgtagttcatcccgttcctgattaaattccagttgcttccagacatataatagatagtagatacgatcttcggtttgcatgcactcgaaagagttggccaaaagtagctgcccccgttcgaaacagtaaatgtcaatggcatctttgcgtactgaagcatacattttcttactattccccagtctgcttttgatagaaaaatactcgatgagcggggtagactgagagtagaagcgggcttcgggatattgttcatttaagaatgtataggtgcttttgtctatgccgaagattacgactacattattcttttttagaatattgtacatcactatttcattctcccgtttctgatgattgtgatagaataaaagctctgcctgctcttcttcaaacagttccaatggtatcatggtaaagcgtttgctggctatcatgatgttcacccgtttgtaggagtagcttaaaaagtccgattcgtggaaaacgtttttaagattagctgtcagagacagagaggtgtctacctctttttcgaacagcgactgcgaattgtcgttaatcggattgtagatagaaaaagaaaatccatccgtactaagacggatggataaagtatattgttttgattttgtaaaatcaatcattattcccagttaccagcaccattgttaggattgtcaatagaacctaccatcaaacctgagtatctgcccagtttttcattaaggtctttcaaattgataatttcttgtctgtcaagtccgcccaagtaagtttcatatggagctttcacttcaaacaagtatacaggagcacctgatttagctgtgtcgtttttaacattcatttcaaagatagcaccgttgccataaggaatgtacttcattgaatctgcattgaaaccttttggatagatggtgtccattacagctacccacatggtgtcacgcttaaagttttcaagtccgtttttcttaacttcatcatacttgcctgtttttttagctttgttgatgattgccattgctttcttctcagtcaagccgctttccaattggtcgtctgtcagctgacctactttcataacgaaaggtaatttttgatttttaacgaaatcaatcagtgtgtcaaaatgttctgtgtacattccgtgatgaagcgaacggtattcctgttgtgctttacggatgtcgatcaaacgggcaatgacagcctgctctctttcctttttcgctttttcaaaattgataggacccataatactgctatagcaaatgtagattaatgcagcagcacagagtactaatacaatattaaatactgttttcatgataaattatgtttttagttgttatattcgcatcgcaaaaatagaataaataaatttaaatacgatagttccgggaacttttttctcgtacaaaaatgataaataactatttagaaaggcaaattaaggaaaattttccttatcaaccaacttttgagcaggaaatagctgtaaaatctctttcagagtttctgctttccacactggcggatgaagtatttatcctcagaggctatgccggtactggtaaaacatctttggtaggggcattggtaaagacgatggatcagttacagcaaaaggctgtgttactggctcctactggtcgtgctgcaaaagttttttcatcctatgccggtcacccggcttttacaattcataagaaaatataccggcagcagtcgttttctaatgaaaccagtaatttttcaataaatgacaatcttgctacgaatactttgtttatagtcgacgaagcttcaatgatttccaatgaaggattgtcgggcagtatgtttgggacgggaagattattggacgacctgatacagtttgtttattccggtcaggggtgccgtcttttgttgatgggagatactgcgcagcttcctccggtaggtgaggagttgagtccggcactttttgcagatgcattaaagggatatggattggaagtgcgggaagttgacttgacgcaagtggttcgtcagatacaggaatcgggcattttgtggaatgcgactcaattgcgtcagctgatagcggaagataattgctactctttacctaaaataaagataacaggttttccagatataaagatggtgccgggtacggaattgattgatgccatcactagttgttatgatcatgacggcatggatgagacgattgtgatctgtcgttctaataaacgcgcgaacctatataataacggaatacgtgcacagatcctttggcgggaagatgaactgaatacgggagatatgttgatgatagccaaaaataattattattggacagagcaatataaggaaatggacttcattgccaatggagaaatagcagtcgtgcgtcgtgtccgtaagacgcgtgagatgtatggttttcgctttgcggaagtgactctcaggtttcctgaccagaatgattttgaactggatgccaatttgctgctggatactcttcactctgattctcccgcattgccaaaagtagataatgacagattattttataccatacttgaagattacgcagatatatctaacaagcgggaccggatgaaaaagatgaaagcagatccacactacaatgcgttgcaggtgaaatatgcttatgcgataacttgtcataaagcacaaggtgggcaatggcagaatgtttttcttgatcagggatatatgacggatgaatatttgactccggattattttcgctggttgtatacggcatttactcgcgccacgaagacattgtatctggtgaattatcccaaagaacaaattttataaaagatttctttttttt

SEQ ID NO: 4588 - DNA, 123435 bp, Unknown
  gut microbiota DNA sequence
agattatatttattttttttcaaaaacctctaagtgtttttcaaggtatgggttgttatataaatgtgaatcgaaaataataaatggaatatcgattctaatatttatataaaaactaatgtttaatcttaaattcaagtgtatgagaatcaatgactcgtgtagaggctcgaagatttttcgggcattgttgatcttgatgctattcgcccttccggcacaatctgcaatagcacagttaacaattaggatctccaattcttctttaggaactgtgattaagcaaatccagtctcaatccaagtatcaatttttttatgatgacaatttggcttcaatgcgaattgagtcattgaatgttaaagatgtttctttggtagaagtactggataaggctttgaaagggaaaaatgtcgtttataaaattgatgacaatgttgtttatttgtcgaaagcaaatgcatcttcttcgacaaagtcgactcaacaacaacagaaagtaacaggtaaggtggtagatgctaataacgaacctttgattggcgtttctgtattggaaaaaggaacaactaatggtactattactgattttgatggtaattatacattagtcgttacaggttcaaatgcagttttgcaattttcgtatgttggatatcaaactttggagagggctgtagcaggaaagactgctattaatatcactttaaaggaagatgctcaagtcttggatgaagtcgtagttacggcattgggaatcaaacgctcagaaaaagcgctgtcttacaatgtacagcaggtaaatgctgatgcagtgactaccaataaagatcctaactttattaactcattgagtggtaaagtggcaggtgttaatatcaatgcttcttcatccggagtgggcggtgtatctaaagtagtgatgcgtggtacaaaatctatcatgcagtcttccaatgcattgtatgtagtagatggggttccgatgtactccaatgcaaataaagtgaatgggacagagttttcttctaaaggaaatactgagccgattgccgacattaacccggaagatattgaatcaatgtctgtgttgactggtgcagcagcagctgcactttacggttctgatgctgccaatggtgcgattatcattactactaaaaaaggaaaagaaggtcgtgtgaatatcacagtgaatagtaatgttgagtttaatgctcctttggtaatgcctcgtttccagacacgttatggtacaggtattggtggcgtgaaagatgataactccagtcgtagctggggccctaaactgacagaagccagatattttggatataatcctcgtgatgattattttcagactggtgttataggtacagaaagcgtatcattctctaccggttcggaaaagaaccagacttatgcttccgctgcagcggttaattcaaaaggtatcgttcctaacaacaaatatgaccgttataatttcaacgtacgcaatactacttcatttcttgatgataagatgacattggatgtaaatgccagctacattttgcagaaagaccgcaatatggtgaatcagggtacttacaacaatccgttggtaggagcttatctgttccctcgtggtaatgactgggaagatattaaaatgtacgaacgctatgacgttgcacgtaagatctatactcagtactggccgacaggtgatggtaatatgactatgcagaatccttattgggtgaactaccgtaacttgcgtgaaaataagaaagatcgctatatgttaggtgcaagtctgaattatcagattcttgactggttaaatgtttccggacgtgtccgcctggataattctaacaatgattatacggaaaaggcttatgccagtacaaatactcagctgacagagttgtcagatcgtggtctttatggcatttccagaagctacgaaaagcagttgtatgcagacttcctggtaagtgtgaacaaaacattcggtgaaaaatggtctttacaagctaatatgggtggatcgtttactgatatgcgatatgatgaaatggctgtacgcggacctattgctgatgattcaaaaacgtttgctggtgaaaaagccggattgacaaacggtttctatattcaaaacctgagtacgaccaagacaagcaaaatgcagtcaggatggcgtgaacagactcagtctatctatgcatctgccgaagttggctaccaaagtacttattatctgacattgacaggtcgtaatgactggccttcacagttggcaggccgtaactctgtcaataaatcattcttctacccttcggtaggtatgtctgtagtgttatctgaattgatgcctaaattgaataaggactatctgtcttactggaagatacgcggttcttttgcttctgtaggtacagcattcgaaagatatatagctaatcctttgttcgcatggaataccagtatcggtcagtggagtaacctgactgacttcccggtatatgacttgaaaccggaacgtaccaattcttttgaagtaggtatgaatatgcgttttcttaagaacttcgaactggatgtgacttattataacgccaagacaatgaatcagacattcaatcctgagttgccggtaggtgaatatgctcgtatctacattcagacaggtgcagttcgcaatcaaggtcttgagttagcgttgaattacaataatacatggaaagattttacttggaatacaggagttacttattcaatgaacaagaataagattcttaccttagctgataatgccatcaatcctatcactcgcgagaaattctctatttcttctctgaatatgggtggtctgggtagtacccgtttcatcctgaaagaaggtggaagcatgggtgacatttactccttgatggatttgaagagagatgccaatggagctgtttatatcgatgagaacaacagtgttgtaacagagagtctggaagctaataattacatcaaattaggtagtgtattgccgaaaggaaacttggcatggcgtaacaatttcagttggaaaaacattaatgtggcattccttgtatcagctcgtctgggtggagttgtattctcacgtacacaagctgttcttgataacttcggagtttctgaagcatctgctgctgcacgtgacaaaggttatgtatcggtaaatggaaacgaccgtgtaaatccggaaggctggtattcagtagtagctggtggtacggctgttcctcagtattacatttattccgctactaatattcgtttgcaggaagcttctatcggttatactattccgagaaaatggctgggcaatgtgtgtgatatcaaagtttcattgatcggacgtaatctttggatgatctacaacaaggctcctttcgatcctgaaagcgtggcatctactgataacttctatcagggaattgactactttatgatgccttcattgcgtaatattggctttaatctgagctttaaattctaaataaatcaagataggtatgaaaaatataataaataaattagtatttggatctcttaccgttgccctgtcctcgtgtatcggtaactatgagaatatcaattccaacccatatgaagctcctgatttgtcagcggatggatatgctttgggatctgccatgaataacctggccggttgcgtggtatcaccggatgtaaatacagctcagttcacagactgcttgttgggcggacctttaggcggatattttgccgattctaatgccggttttacagaaaccatttcaaacttcaatccgaaagacgactggagccgtgtgtttctgaaaagtgataagattattccgacattatattctaatctgacccaagtgaaacttgtatcacaaaatacgaatgatccggttccttatgccattgcacaagtgataaaggtggcagctatgcatcgtgtaactgatgctttcggtccgataccttattctcagataggtgcgaatggcgaaattgctactccttatgattctcaggaagtaacatataatacattcttcgatgagttgaatgcagctattgccacactcaatgagaattctaacgaacagctcgttcctacagccgactatatatataaaggtgatgtaaagaagtggatcagatttgccaactcactgaagttgcgtcttgctatccgtatagcttatgctaatccggtgaaagctcaacagatggctgaagaagctgtgaatcctgcaaacggaggtgtcatcgaatcgaatgcggacaatgcaacatggaactactttgagacttcacaaaatcctatttatgtagctacccgctacaatcaggtacagacttccgatcatggcggtgtaccctgtttgactggtggtgatacgcatgctgctgccgatatcatctgctatatgaatggttacaaggataacagacgtgaaaagttcttcacaaaatccgaatgggcgggacaggactatgtaggaatgcgtcgtggtattgtcattcccgaactgaagacaaccggacataaatactctggggtgaacattgctcctacatctccgctttattggatgaatgcagccgaagtagctttcttacgtgctgaagggcaagctgtttttaacttcagcatgggtggtacagcagaatcattctataatcaaggtatccgtctgtcatttgagcaatggggtgcagacggtgtggaagactatctgaaagatgatgtaaacaaaccgactgcatatacagacccggcaggtacgaacacttatcagaatgctttgtccaatatcactattaaatggaatgatagtgctgacaaagaagagaagcaagaacgcattatcgtgcagaagtggattgccaactggcaattgggtaatgaagcttgggcagacttccgccgtaccggatatccgaaactgatcccggtgaaagaaaataagagcggtggtgtcgttgattcagagaaaggggcgcgtcgtatgccttatccgttggatgagtttgtcagcaataaagcaaatgtagaatatgcgattgccaactacttgcacggtgcagataacatggctacagatgtatggtgggcttctaaaaaataatattaaacttaaaggaaagtatatatgaaaaataacctgaaatatagattgtctgctctgctgtttctggcatcagctctgacaataacttcatgtagtgattggacagatgtggaaagtctccaattgaatactcctacatttgaagagcagaatcctcagttgtatgctgactatctgaaggatttgaacagatataagtctgaagaacataaggtcacttttgtttctttcgagaaccctaagggatctcccggcaagcaggctgaacgtctgaccgtcgtacctgacagcgttgatttcatttgtctgaataatccggaagtaagtcccgaagtacaggcagaaatggtcaaaatacgcgagaaaggaactcgtacggtttacagtattgattattccagcattgaaaatgcctggaaggagaaagtaaaagccgaaccggagttgacagaagaggatgctcttcagtatatcggtgaacgcaccaatgagatgttggcactctgtgacaaatataactttgatggtgttattgctgattatacagggcgttcgctggtgagccttccggaggcagctctgaaagaatataatgaccgtcaacagaagttttttggcgaggtgatgaactggcaaggcaatcatgatgacaagactctggtattctacggaaatgtacaatatttagtgccggagaatatggatatgttaagcaagtttgactacatcatgttgaaaactgcttcttctaccaatgctgatgatcttgctttaaaagcatatttggctattcaggcgggtatagatgcagtaggcggtacagaaggaggagtgaatcctgttcctgctgatcgttttatcgtttgtgtcgaattgccgcaggctgacgataaggataaagtgaagggttactggagtacagtggatgaaaaaggcaataaactagtagcagctccgggagcagcccggtggatggttgaagcatctcctaattacacccggaaaggaatctttattatgaatgtccataatgattattataacaatacttatggatatgtgcgtgaagttattcgtattatgaatcctaataaataagaatagaaatgaaactctataaatattgttttgcgcttttggctcttacaacagtcacagtgagtggttgtaagaatgaagatatcaatgaagagcatcattatgacaataaactctatgttagctcggctcctgtttgtgatgatttgctgattaaacccagtataactgaggctacccgtgaacttagctatcgtatagcatcgccggcagaacaagatattcaaataagctttgatgcggctcccgctatgacagcagcatataatttgatttacaatgataacgcaactgcactggattcatatttttataatataccaacaaaaactgctactattaaggcaggggatatttccagtgataatattgtgattgactttaagaataccaacgaattggataagtcaaaacgatatgtattgcccgtcaccattctagatgcatccaatattgatgtactcgaaagtgcccgtactgcttatttcatatttaagggtgctgcccttattaatgtagtggcaaatatcaaagaaatctatttcccaattaactggaagagcagtgtgaatagtctttctactgttactattgaagctttggttcgtagtgaagactgggtagcaggacgtgataatgccctgagttctgttttcggtattgaaggtaaattccttgtacgtattggtgatgctgaccgtccacgtgatcaagttcaggtagtagctcccggtggtaatttcccaggtccgaatgttgttccgggtttaccggttaatgagtgggtacacattgccattgtttatgataatacaacaaaagaacgaatctattataaagatggtgtgcctgtttataaagacgaagcagcttcaggtaatgtatctttgagcagtggttgttatattggtcgcgcttgggatgatactcgttggttgccgggagatatttcagaagtccgcgtgtggtcagtgcaaagaacggcagagcaaattgccactaatccttatgaagtagatcctgccagtgaaggactggttgcttactggaagtttaatgaaggtgctggaaatgttattaccgaccagactggacatggtaatgatattacaggttcgggcgatcctacttgggtaaaagtagagattcctaagataaattaattgttggtttaatcttttattcaagaattcattatgaatatgaaatatataacttcgggtttgttcgctgccatgattgtgagcagtactgcattcttgacctcttgtgctgatgatcttgaggtcggaaagaatattgatgagtcggcctacagtggcatttatgaaaataatgcatatctgcgtgatggaaagtcgaacttagtttctaaggttgtcgaattgcacggtgagacttatgctactacagtaaaaatggggttgagcaagacacctaatacagctacatcggcaaaagtgaaaattgatgctgcttatttggaaacgtataataaggcgcataatacagattttgcattgtatccgcaggacttggttacctttgctaacgaaggaatacttacagtgaacgctaatactaaatcagcggaggtagagatgactattcgggcaggagaaggtctgcaggaagataaaacatatgctattccggtagctatcagtgatcagagtagtgatatcactattaaagatgaagatgcgaaacattgtatttatctggtgaaagatatgcgaaatgccggtgatgcatataaaggagaaggtgtaatgcaaggttatttgttctttgaagtaaatgacgtaaatccgctgaatactctttctttccaattagagaatggaaaacttctttgggatgttgttgtactgtttgctgctaatatcaactatgatgctgaagcaggacgtcctcgtgtacaatgtaacccgaatgtacagtatctgttggataataatgaaactcttcttcagccactgcgtagacgtggtgtgaaagtattgttaggactgcttggtaaccatgacattacaggcttggcacagctttccgaacaaggtgctaaagactttgcccgcgaagttgctcagtattgtaaggcatataacttggatggagtaaattatgacgatgagtattcaaacagtcctgatttgagcaatccgtctcttactaatccaagtacggctgctgcagctcgtctgtgttatgaaaccaaacaggcaatgccggataaactggttactgtatttgattggggacagatgtatggtgtagctactgtcgacggggtagatgcaaaagaatggatagatattgtggtagccaactatggtagtgctgcatatcctatcggacaaatgacaaagaaacaatgctccggtatttcaatggaattcaacttaggtggtggcggtagtttatctgcctctaaagctcaaagtatgatagatggagggtatggatggtttatgggatttgctccaagtccggctaaatatggtagtgttttcagccgtcttcaaggtggtggcgaagtattgtacgggtccaatgtagcagcaccgactatattctacaagaagaatgatccgacgccatataaatatccggatgatctttaaataaaataggaacaaataaaaaacaagaatatgaaagcacattataaactctttttatctctggcaataggatcattcgttacttttgctggatgtcaggatgatgaggtggtggatttggttaaatatccggtgaatcagcctgctataacgattgacgatgcggaaggagcgtctaaagcgacgttgactgcggtttacaaatctgatggtacattggaattagatggccctgtcactagaacttatacattccattttgctgcatcaccggaagatgctacagtgacttttgatattataaatactaatatcccaaaagaaaatgtagagatcagtgccactaaagtagttcttcctgccggttcaacagatgcttctgtcactgtgactttgaaggatgaagattttagttttgcagcatccaattatgatgcgactacttatgaattaggggtgaaagccagtgtggaaggatataagataggaactgaaccaatagaatctaaagttgtaatagagaaggaggcatatacagcttcatgctctgtggttggtgagagcggtaataacgttgcatttgaacgtgctttttctcaaggagcgattgtaaatcctgatcctatatcctatactttcaagatgaagttggataagccggcaagaaaagacgtaaaagtgaaacttgccactacgggattggatgaacagttcatgaagaatatcactgtaactcctgctgaaattaccatagctgccggagagttagaatcagcagaggttacctggactattactgatgatttcttgctgacaacagctggagaagaatctcacactcttgttgttactgcatcagcagaaagtgaagaccccgttgtgaaggttaatagtaaggagaacttcttaacctttaatgtggataaagtacttagaaactttaaatatttgtctgttataggtagtaactggactgaattgtcgaaagcaggttggagtgcggagattccttctggtgtctccggtagagctagttatttgattgatggtaatggaggaagctatggatcagatgtatatagttataatccattctggtttgttattgatatgaaatcagcacagacttttaatgctttgggtatggattattattatacgtatgcttctaagaaagtacgtatttcaacttcattggataatgaaaactggactccacagggagtgttggaagttcctcgtgtgggtaatcattatttccaattcttctcttctataacagctcgttatgtaaaggttgaattattggaaggctttggttcatatattgatgtaactgaagtttatatctacaacgctcagtaaagtctagtcattagcagataagttaattttagagccaggcttcattttgaaagcctggctcttttcttgtataagctactatgtccctccctgtctcctcgtaagggaacccttgtgccaagggcttggcacagttgtgccactacggtgtcattgttgtgccaacggcttggcacagccgtgccaccaaatggtgacagttgtgtcttctgagcgtaacagtagtatcacttcgtgttactgccgatcaccagtcataatcttcaacgtatgcatcaaagttttgtagatgagttgctccgcaattcttgaggatatttaatattctttgttgctcggagggggtaaggaggcgttcgcctttgcggatgcggtagtaagttctgcgaccaaaatagctcattaaatgtgatatgacagtttgcatttgcttataaggcaagtcttctaacattctgatgaatcccttagcataacgtactttgacattagaacgataataaggacaattcccttgttgggcagcgagatgtttgggactgataataacccagtattcaatcttttccggtacgctttgtgctgtaagtagtcttaagcaagtgtttgcttttgaacattcccgattgaggcacattgcgtactgataggggactttggtaaagtcaatttcttcttccatgatttatagttgtttgtccggcaaaagtagtgaatactaactgaaaaatagcctgaaagtaaagaagtttactttcaggctatcgttttttttgccattatccggataaagtctttcagaacagagagaaagtcagaaaaccggaagaaaaagggcctaatataggaacgtgaatttaatcgatgaactaactactgttctttggaaaaagaataaggcatatcctcttctttggttcctctgttcagattcggccgattactcatgtctactttgatagtacctcccttgaacaaatcttcgtgacgcagataattcttggtatgatcagcaccattgaagttcatggaatcaatatagaaattttccgtgctgttattgggcgcgtcgataacaagactattgccgttctcgaagtgaagagtagcctttttgaacagaggagttcccatcacatattcgtccgttccagggcaaacagggtagaaacccagcgcagagaacacataccaggcagaagtttgtccgttgtcttcgtctccgcagtaaccgtccggtccgggcgtgtacattctgtccattacctgacgtaaccagtattgagccttccacggttgtcccgcatagtcatagaggtaaatcatgtgctggatcggttgatttccatgcgcgtagttgcccatattcatcacagtcatttcacgaatttcgtgaattacctgtccgtaatagctgtcatcaaaaatgggcggtacggcaaatacggaatccatcatggtaacaaacatctctttcccgcccatcaggtcaataagaccttgcggatcgtggaagacagaccaggtataatgccagctatttccttccgtaaaggcatctccccatttcagcggtgagaaaggagactggaatgtaccgtcttcgttgcgaccacgcatcagcttggattctttatcgaaaagattcttgtaattcatggcacgtttggcaaacaggttgatttctttcttgggacgtttcagctcttttgccaaccggtagatacaccagtcatcgtatgcatattccaaagtacgggcggcgttctcgttgattttcacatcgtagggtacgtatcccagtttattatagtactcgtatcccaatcgtccggtggaagaaacctccggatgtacattctccgttccgtgaatcagtccttcatacagcgttttgatatcatcgacttttactcccttcatataagcgtccacaaggattgatgcggagttatttccaaccatacaacctctgtgtcccggacttgcccattcggggaagaaaccgctttccttatacgtgttgattaatccttcctgcatctctttgttgaccgacgggtacatcagattcagcagcggaaagaggcagcggaatgtatcccagaaaccggtatcggtaaacatatatcccgtaagtacctgcccgttatacggactgtaatggatgggctggccgtttgcatccagttcatagaacttgcgcgggaatagcagcgaacgatacaggcaggagtagaatgtacggtactgatccagattaccgccttctacttctattttacccagtacttgattccaggcatcttttcctttttgggcgagttgttctatgttatctttgcccagttcgttcatattagcagcagcctgctcaaagctgataaaagaagaggcgatacgtgcattcacctgttcccctttgcgggttttgaatccgatgatcgctccggcatggtcggtcatctgttccgctacgttctcttgcagatttccgttttctaccgtagccttataggtgaaaggtttgtcgaactcgatgataaagtagttcttgaagttttcaggaacaccaccgctgttgcgtgtcgtataaccgattatcttattctcttccggaagaatcttgatgtaagaacctttgtcgaaggcatctacgaccacataagaatgatcattctccgggaaagtgaaacgaaaaagcacggcacgttccgtcggtgtcatttcggtgactatatcgtgttctgccaggtatactttgtagtagtaaggagttgccacttctcctttatgtgcaaaccagcttgcccgtttctcttcgtcaaacaacggttggcccactatcggcataatcgagaactgaccataatcattgatccacggactgggctggtgtgtctgtttgaacccgcggattttgttggcggtataggtatattgccatccgtctcccattttgcctgtctgtggagtccagaagttcataccccagggacgggcaatagccggataagtattacctgttgataactcaaaagtagactgggaacccatcagcggattgacatactgcgtccagtctttggcttgggacaatagcgtacaactaagtacacaagctatcaataagagtcttttcatgataagtaatggtttttatatgattattgagaagagttgttacttccccattgtgtaggatggtcagtcattttgatctccatgattccgcctgctacaatgtcctgatgtccgaagaatggcgtgtccagagctttgccgttcagcaatacgctttcgatatatttgttgcttttggagttgttcttcaccacgatgctgaatgtcttttcattggggagattgatcacagctttgtcgaaagccggacgtccgatagaatacaccggtttgcccgggcatacctgatagaatcccatcgagttgagtatgtaccatgccgacatctgtccgcagtcttcattgccggacaacccgtcgacgttgttggcatactggctccggtagacactgtccactaattcctgcgttctccacggacgattcacatagttgtacagatgaatcacgtgatgactcggctcattgccatgtgcatactgaccgatcagtccgctgatatcagccgaggtggtttctccgtccagactcgaatcgactgtaaacagcgaatccagcttttctacaaaagcctcctcgcctcccatcagttttacaagtccttccacatcgtgcggaacaaaccaggtccactgccaggcggttccttcgcaatagtcatcgctacggtgagtggaggcacgcgggttgaatggggtgcgccattcgccattcgaatccagtccgcgcatgaagcgggtcgatttgtcgaaatagaactcgtaggctttggcgaaacgttcatactttgctttgttttcgaagtcgttcattgcttcggcaaagatggagatacaccagtcgtcgtaggcatattccagcgctttggctacagattcattttcgcggtcgcaggggatgtagccgatggcgtttttataatacttcgctttgggcatcagatgcggcagcaccagatcggggcatttgatacctgtagtgtcatattcggctgcccgtagactggctttatatgcttcgtgagcatcaaaattgcggtaacctttcatataggcatccacgataacggggaccgcatgatatccgatcatcgttccagtgtagttggaagccagatcccacatcgggtatattccgccttcctgatgtttcctgatcagtgaattgatgaactgattgttcagattcgggtcgatgatcgtcatcagcgggtgcagtgcacggaaagtatcccacagggagaagacagtatacagcggattaatggtatctccctgatgtacttcgagatccatgccgagatagcgtccgtccgcatccgtaaacaggttcgggctgatggccgtatgatacagagcggtatagaaaatggttttatcttctttatcggaagtggtgatgtctattttagacagataattattccaggcggtgcgggcatcttttcgtaccttgtcgaagtcccattcgggaatttcggattccacattcttgcgtgcgccagcgatatcgacagcggatacacccacttttaccagtacttcttcgtctttctttgtattaaagtgcagtacggctttgcatacaggcaggcgtttgccgttctccattgtgacagagtcggtgatgagggtatatgcgaacggtttggaaaacttggcgtagaagttaatatactggtcgaaagcccagtaagtcgtcttcttatgtccgcagatttccgtgtcactgataacttcgatttccatctcgtagttggtctgccgttgcaggctgtagtccagatcgatgataaatccggattctgtgctttcggggaaagtgtagcggtggatggcgccgcgtttggtagctgtgatttccgcttttacctgataggtgtcgaggaagacggagtaatatccgggttccgcagtctcattctcgtgcgagaaagcagaggcgtaagccagtttctggctttccggatcagttgtcagatactgcggtttgccgacaatcggcatcagtaatacatctccgtagtcacaacagcctgtaccgctgacgtgggtatgcgaaaaaccgttgatcgtgttgtcgtcgtaataataaccggagcaagcgtcccagccgtcgatccgggtgtccggactgggctggatcataccgtgcggaactacggctccagggaaagtatgtccatgtccgccggtgcctatgaaaggattgacataagcactataatcttttacactgggggactctgtgcaggagttgagcattataaatcctccgtaacatcctatcagaagtgtctttaatttcatgtcgtttattagtttaagtttaacacaggactcattttttatctgaagagataaagatgttgtttcctacgattttatattcaataggtatggaattctgcaaggatttcaataccgattcgatggttgattttttcttcaatacacccgaatatgttttgtccgaccgaatgtcaggagacagaatgattttcacgtcgtagaagcgttccagtgctttggtgatggtaaatatgtttgctttattgaatggtatcagattgtcacgccatacagcatccagtttcgcatcgacctgtttcaccgtcagccgtccgctgtttctgttcagttcggcacgctgaccgggggcgaggacaatttgtccttcgtccttgttgcctttcacttcgatttctccttcgatcaaggtcgcttcggctatccggcaacgtttgtcgcacttgaagttgaaagtggttcccagtacacgtacgcgcatagcgtcgctttctaccgtgaatggtttatggcggtttttggttacttcgaaataggcttctccgtctagatacacattacgttctttttcggagaattcgcgcgggtacttcagcatggcggcattgttcagccagactttcgtcccgtccggcaagacaacttctttcacgatgccttcattggcaacggctaccagcatctgatgctccggtcggttgtagaaccaatatccggctcctccgcccattagtaaagcgacggcaaggatggccgcatacctcatccagcgatgcatatgcagtactttatctttcttctttttctcttgagacagttgtttataaagccttttttccgcattagccattctctgttcatcggcataatggtcgaatttacccagatgataaatttcttccatgcggaacaactggcgggcattttcgtccgattcgctgatccaggcattcaccttgatcagctcttcttcagaacactgaccagtcagatatttgtttattatttcttcgctcagatttctcattttcttttccttcatataagtaatacaattgaaaacccaaaaacacttatctttaatccaataaaaataagaggagaatgaaccaaagatgtccgagacgatttcgcaggaacttcaatgccttatacatatgtgcctctaccgtgcggagtgaaactcccagtacatcggctatctccttatttttcatgtcgtgcagatagctgagcttgaaaacttctttgcacttgtccggaagctcattgattgcatcgtgaatctctttccgcaattcccggtcttcgatcttgcggatcacttcgttgttgtccggctgataaaactctgcacgcctccggtttatctcttccatggcggcgcaatagccatcttctacattacgatgtttcaatacgttaagggcacgtgtatagacagcacgatagaggaaagcctgaatctgctctcctatctctatgctgtcttttcgtttccaaagctctacgaacacgtcctgcactacatcctccgcctcttcttctcctaccagtcgggtggcatagaatatcaggctggggtagtacctgcggaatagagctttgtaggttaagtcgaagttttcatccatttttccgatagattagtttaggtggacctactgggtttgttcttcaaattcgacttccactaagggagtattccccatttcaaattcgacggtggcaccgctcataatctgttcatgggtaaggtaggtcttgttgtacggttgaccgtctactttgatagattgaatgtaaatattctctttgctcactttgggggcaagtactgtaaatgtctttccgttagccagatgcaacttcatctccgggaacaggggagtaccgatttcatactttccgctgaccggattgacaggatagaatcccattgcgctgaatacgtaccaggcagacatttgtccgcagtcttcgtttccgcaaagaccggcaggctcgttcttgtaaagctcgttcattactttggcaacgtatttctgtgtcaggttttgttgtcctacggcattgaagagatagattacgtgatggctcggttcattgccgtgagcatattgtccgatcattcccgtgctgaagatgggaagttcttcgtcggctgccggatggtaggtaaacatactgtccagtttctctgcaaagcggcttgtgcctcctgtgagatcaatcagaccgtctatgtcatgctgcacggaccaaaagtattgccagccgttactttcgcagatatgcggagtgtattcgtcggctttgaagtctttgataaagtttcctttatcgtcacgcggctgcatgaacgaagtggccgggttgtaaacattcttgtagttatgagaacgtttgtagaattcgtccgctatctccttcttacccatcttgttcgccatctcagcgatgcagtaatcgtcaaatgcatattccagtgttttggacagtgaccaattttcggcattgtaatgatctgtcacattgtaaggaatatagcctaattgcttgtatagcccgatgccccggtagttatccaagttggcggtagctacgcaggcggccagtgctttctccgcatcaaagttgcctatacctttcagataagcgtctacaatcacgggaacggcatgatagccgatcatcatatcggtttcactcccgtagaagttccatacgggcaggcgtccgttctgttcaaagaaggcgatgaaggattttaccatgtcgttgacacgttccggctcggtatatgtgaaaaggggatgggcggcacggtaggtatcccaaagggagaaagtgctgtaattcacccagccgtcactctgatgtacttttttgtcgggaccgtaataggctccgtctacgtcactgtaaatcgtaggcgcgatcatcgagtggtacagagctgtataaaagtttactttatcgtcttgattgttactctcgacttcgatctttcccagttggcggttccagtttgcttttgtttctgccagatacttgtcgaagtcattttcgggcacttcggcttgcaggttcttggctgcgccttccatgctgacgccggaaatggcggtattgacgagaatctgttctccttcttcggtatggaagtcaaaacgtgcgatgacagccgtaccgatgtgttgcttgtctttgataatggcagtcgtatccagtttcaccttgtcgaaaggcttggagaagcgggtgcggaagtagattcgctggtcgcgtgcccagccgtcggagtaacggtatccttgaatcgtcacagagtccactacttcgatgtgcgaatcgtttgtgaagtcccagttcatggctttcttcagattcaggaagatggcggcttcggctttggggaaggtgtatcgctggatgccacaacgttcggttgcggtcagttccacattgatatggtagtctttcagacgtacttgatagtagcctgcataggcgctctcttcatcgtgagaaaacttggagtagatgcccagcggcgcttctgcctctttgtagggcagtgtgaccggcatgaaagagatgtcgtacaagtcgcctgcacctgttcccgaaaggtgggtatggctgaagccggcgatggtgctgtccggataaaaatagccggagatgcggtcccatcccggaagtccgttgtccgggctgagctgcaccataccgaagggggcttgtgcgccgggataagtgtttcctgtgaaatcggtgccaataaaaggatttacatacgatgtgtaatcaatttcagcttttgtctgtttggtgttgcaggatgcaaaaatgcaaacgattagaagtaggtaaataggtgttttcatcggtgtacgggtattggtgattacttattttattatttgaaggataagaaaaataattaatctgtttacaaaggtaggaaaaagttgtgataattgagtttatatcacgaatatttttggcaggaggctgattagttgctgttgacactggaatctgaaataaaaaaccgtgccttaaagtgcgggtgactttaagacacggttcttgtattggatgtatgttactgcttttttagatacctgcgagttccagtaccttttcgatagcggcattcagtccgtctgtattcttgcctccggcagtagcgaagtgaggttgaccgcctccgccgccttgaatcagtttggctgcttctttcaccaggttgcctgctttcaagccaccggccaccagattgtcacttagcatgacggtcagcataggcttgccgttgtcgaggcttccggccacaaagaataggttttctgtgatttcaccgcgaagctggaaggcgatattcttcaccacttccgccggcaacggagcacagaacttgattaccttgataccgtgaatttcctgtatattcttcagcagtctttctttcagcgaggcttctttctctttcatgtagtcttctacctgctttttcagtcctgcgttttcctcaatatacttgcggatggcaatacccaggtcgggtgcgttgttgaagagcgatttcaattcactgatcgtatcctggatggtatccagcatttcttccacacgggctcccgtatatgcttcgatacggcgtacaccggctgcaacagagctttcggaaatgatcttcaccataccgatatttccggttgcggctacgtggatacctccacagaattcgatagaagaaccgaactggatgacacgtactctttcaccgtacttttcaccgaagagggcgatagctcccagctctttcgcttcctcgataggaatgttgcggtattccttcaaaggtatgttggcacgaatcttggcattcaccaggtgttctacctggcggatttcttcgtcggtcaccttctggaagtgagagaagtcgaaacgcagtgaatctggtgttactaacgaacctttctgttcgatatgctcacccagtacttcacgcagggcagagtccagcaggtgagttgccgagtgattggctgcgcaggctgcccgtttgtcggtgtctacacaagccatcatcggagcttccggatgttccggcaactttttggtaatatgtatcggtagattgttctctttcttggtgtcaatcacttcgatggtctcgaattcgctgaccaatacaccggtgtcgcctacctgaccaccgctttctgcatagaacggagtacagtcaagtacgatctgatacagtgtctggtttttctgcttgatctgacgatagcggagaatagatgcttcgtattcagtatagtcgtaacctacgaattcggttgttccttctctcagagtcacccagtcaccggtttcgatggcggcagcgttacgtgcacgctgtttctgctgttgcatttccgcgttgaactcttcgatgttgactgtcattccattttcgcgaagaatcagttctgtcaggtctaacggaaaaccgaaagtatcatataaggtaaaggcatctttaccgctgatttctgtctttccggcggcctttgtatcttccattgttttatccagcagacggatgcctgtttccagcgtgcgaaggaaggcttcttcttcttccttgattactttttcgatcagacctttctgtgcgatcagttccggataagcgtctcccatgttgtcgatcaacaccggaagcagcttgtacatgaatgactgtttctgtccgaggaaagtatatccgtagcgaacggcgcggcggaggatacggcggattacataacctgccttggcattggaaggcagctgaccgtccgtaatggagaaagcaatcgtacggatgtggtcagcgattacacgcatggcgatgtcctgctgtttgtcttttccgtactctgtgcctgacattgctgcaatcgctttcagcatcggctggaatacgtctgtatcgtagttggaagtcttgccctgcaaagccatacagaggcgttcgaatcccatacctgtatcgataacctttgcaggaagtggttcgaggctgccgtcagctttacggttatattgcatgaacacaaggttccatatttcaatcacttggggatgatcgtggttgacgagatcacggccggagattttggcacgttcttctgccggacggaggtcgatgtggatttccgaacaaggtccgcaagggcctgtatcacccatttcccagaagttgtcgtgcttgttgccgttgatgatgtgatctttcggcagatactgttcccagtaagaagcggcttcgtcgtcacggctcagtccttcttcggggcttccttcgaatacagtggcgtacaggtgttccggattcagtttcaatacttctaccagatattcccatgcccagttgatggcttctttcttgaagtagtcaccgaatgaccagttgcccagcatttcgaacatggtgtggtggtacgtatcgtgtcccacttcttccaggtcattatgctttccgcttacacgcagacatttctgagagtccgcgactctgtggtatttggccgggtggttacccaaaataatatctttaaactggttcatccctgcgttggtaaacatcagggtagggtcatcttttatcaccatcggagccgagggaacaatgtggtgtcctttcgtctcaaagaaattcttgaatgaatctctgatctcttttgcagtcaacatattcttctatatatctattgttgaggttaatattctcaaaaaactgtgcaaagatagcttgtttttattacttttgccgtattaacaagcgaaatatttccaaaaagatgcgcaaagtttactacatctacaatccaaggacgcagacttatgaccgaatttaccctaccgtacggcagcgtgcacttagcattctgcgccggctttttatcggtatgggacttggagccggatgcttcatcgtcttgcttctagtgttcggatcgccttcggagaaggagctgcgaatcgaaaatagccgtcttttggcgcaatataatgtactttcccgccgtctggatgatgcgatgggggtgctgcaggatattcagcagcgtgacgataacctgtatcgggtgattctgcaagctgatcctgtttcgccggctatccgtcaggcaggttttggaggtacgaaccggtatgaggagctgatggatctggcaaactccaagctggtggtaaatacgacccaaaagctggatgtactgtccaaacaactttatatccagtccaaatctttcgatgacgtggtggatatgtgtaagaatcatgatgaaatgctgaaatgtattccggctatccagcctatctccaataaagaccttcgcaagactgcttccggatacggaacacgtattgatccgatttacggtacgacgaagtttcattcgggaatggacttctccgctcatccgggaacggatgtctatgcgaccggtgacggtacagtggtaaaagtaggatgggaaaccggatatggcaatacgattgagattgatcatggcttcggttatctgactcggtacgctcacttacagagctataacacgaaagttgggaaaaaggtggtgcgtggcgaggtgattggaaaagtgggaagtacaggtaagagcaccggtcctcatcttcactatgaggtacacgtgaagggaaaggttgtgaatcctgtcaactattacttcatggacttgagtgcggaagattatgagaagatgattcaactagccgccaatcacggtaaagtgttcgattaatctcttaaaacaacgatttctatgctgaatacggacaaagaactaaaattatattactccatagccgaagtggccgatatgtttggagtcaatgcatccttgcttcgtttttgggagaaggagttcccgcagatttctcccaggacaacggggagggggatacgtcagtatcgaaaggaggatgtggaaacgattggtctgatctatcatctggtgaaggagaaaggtctgacgcttcccggtgcccgtcaacggttgaaggataataaggaagccacggttcgcaattacgaaattgtgaaccgtctgaaaggtattaaggaagagcttctggctatcaagaaagaactggacggacgataaattattcctccacccggttcacctgtttgatgttttgaatcttcttcagattattacagattgtctttacatcttccacatcgtgtacccatagctgaatctttccttcgaatatcccgtcattcgtttcaatggcaagtttacggatgttcacgttgagctgtctggaaatgacctgagtcacttcattcagaagtcccatgctgtctatacctcttaaatagatatatacgaggaaagaaagttctttgtgagtatcccattcggtcgctaatatacggttaccatagctgcttttcagcttggcagcaacagggcactggcgtttatgaataataatgcggtcgttttcatcaacgtaacccaaaacatcatcaccgggaatcggatgacaacattcggccatgatgtatttcttttgcaggctttcttcggtcagtttaagaatctctttcggattgatcttttctttttcctgcggttctttctcttccggtttttccttgttgttgttcccgaaggagaacgtcaggtatttcttccagttgctggtttgcttttctctcagctcgttcttgtccgcttctcccaaagtaatggctttgctgccgatagcggccagtaactcttcttcattcttgaagttgtgaaatttacgcaacttctcgatgacagcttcttccggacgtatttcttccttcttcagaaactcgttgagtagctcttcgccaattttctgattcgctttccgttctttgcgaagaatcgctgcgatcttggcacgggcacgggcggtcgttgcaaatacctcccattgcggttgtacacgttgggatttggaggtcaatatttcaacctgatctccactttgcagtttatgacttagcggcaccagtttatgattgaccttggcgccgatacaatggctaccgatatctgtgtgcagtgagaaggcaaaatccagtgccgtagagttttgtggcattgtctttaactctcccttcggagtgaacacgaagatttcggaagcaaacaggttcagtttgatcgtatccaaaaagtcgattgcgtccggttgcggatcatccagtatctctttaatggttttcagccatttctccagttcaccttcgtcttcgctgcctcctccttctttatatttccagtgggcggcaaagccttgttctgcaacatcgttcatccgttcgctgcgaatctgtacctcgatccattgtccgttgtttcccatcagggtgacgtgcaatgcctggtaaccattcgccttcgggtggcttacccagtcgcgtaggcggtcgggatgaggcttgtatatcttggaaatggagacatagatgtcgaaacagtcgttgagctcttcttccacgttgcgtggttcgaagatgatacggacagcgagcaagtcataaatctcctcgaacgggacgtgtttggtctgcatcttgttccagatggagtagatcgatttcacacgtgccaaaatccggtatttcagccccatcttatccagctgggtgcggatcggagctgtgaagtcgttgaatactttgtcgcgttcggcggcggtagcattcagcttttcttctatttcggcatattcttcggggtgttcatatttgaagctgaggttttcaagctctgtttttatcttgtacagacctaggcggttggctaacggggcatagatgtagagagtttctcctgctatcttatattgcttgttgggcagcatggaacccagcgtgcgcatattgtgcaagcggtcggctattttgatcaggataactcggatatcgttcgacatggtgagcagtaacttcttgaagttctctgcctgtgccgaagcacggtcaccgaagatccctccggagattttggtcagtccgtctacaatctgggcaatcttcggtccaaagatattttcgatgtcttctaccgtgtaatcagtgtcttctactacgtcgtgcagcagtgccgcacagatagaagtagaaccaagaccaatttcgttacatactatttgtgcaacggcaatcgggtgcatgatataaggttcgccggatcggcgtttgattcctttgtgtgcctgattagcgaagttgaaagcttttgtgatgatttcaactcgtttgcgatgtttagtatggagataatcattcagaagttcctggaacgcctgattgatcatctcttcatctgctatttctttgggggttatattatccatattcgttatcctttcattcgcttatttttgcaaaaataagcaaatttccgaatgaagcaagcgggaagtcatttatttgtagattttcaattgttttcctgctgcgattctggtgttcgacataccgttccactgctgtatatctttgacacgtacgcctagcttttcggcaatcgatgaaagagtgtctccactttttatcttataataagttaattttcctttaccggcaacagcgcttgtctgtctgcgggtggttggagtaacttctttcactgcaacggttttgcggttgcggaatagctcgtcggcacggtgtgcgtagattgtatcttgcttgtcaataaacgtactgatggcaccttgtggtaaacgtaatgtacaaggtttggtcgtgccgggaatcacttgtttcttgtattggggattcaggcttttcacttcctccagcggaacattgcaaagttcggcaatctgctcgaaatgaaggtttttagtgacttgcaccgtatctgtgcttgccggaatgtttgtttccatcggacagatgttgtggtcgcaatagtatgtcatcacgtagttggctgcgatgaaagcaggtacatatccgcgtgtctctttaggcagcaggttatagattttccagtaatccgtttcgcctccggcgcggcggattgccttgttgatagtacctgggccacagttataggctgctataaccagattccagtctccataaatatcgtacatctctttcaagtaacgggcggcagcccaggttgctttgatcgggtcgcggcgttcgtctatcagactattggattcaagaccgtaaatctttcctgttccaatcatgaattgccacagtccagaagcaccggcacgtgacacagctgaaggattcagtgcagattcgataatcggcaggtacttcagttccaaaggaagtccgtaagcgtccagtgcttcttcgaaaataggcatatagaaattgcaggcgctcagcatgaatgaaacctgattgcgcaggcgacccgcgtacatatcgatgaatttgcgtacaatgtcattataaggcatttccatgacagccggaatacgtgaaaggcggtcaatgtagacagaatcactgaataaaggattcacttccgccgtactgcaatctttgcctaaatcaatatagtttttagctttccagtcgttcagcagactgtcgagcgggtaagtcatactctttggaagatcgatgctttctttgcgttcggttccgttttcacgaataactacatctacactttgagcttttacctgtgtggttgccaacaggaaaaggaaaataatcgaacaatagttttctaatttcttcatgctttaattataagttcaatctaaattgtgtttttaaaatcgtagtacgcattgcagtcccactgacttattcttgtaactgttggagcggaactggctgttattgtcgatgacagttggctccagcttcatactcaagtcaggtgaaatgtcgaagttcgataattccgcatcgacataggcatcgatgatggagataaggtatactccgataaatgcaaatatactaaggtcccgaaaacgacggaacgagtcctttcttcgtttcaaggtgtttttcagttgctcttcattatactgggcgttcggtggcagcaaatcttcatagctcttggtgtttggattactgtccatgatgtccagataggcctgtgaatagtctttatacattttcccgttccagctgagggcatacgcacatcctgcaaaccctccatatataataggtagtttccagtatttacggttgtaaatctgtcctccgccagggaatacgactgcaagccatgttgctttggtcgggttgggaatgaacagtttcttgttgagatcctgcacaggaggtactgtgtcggttttcactacaataggtgccggctgttctatcttcttcagttcttttttattggctgcgtcaagactgtcggctatctgtattttgacagcagacagactgtcggttgcttgcaggcgttccggatgcaatattttgattgaatcctttttcaacgaatccatcacctgagcaggatcccggtgccttcgtgcacgtgctttcggtgcttcccggctctgaataatactgtctttctgtaccggagtcacaggttcttgtgcatacacatcaatccctgccacctgtagaaaacagagaagcagggtgatgatgggtaactgatatttcttactttttcttgtcatctacttttttagcgtatcgaagatttccatgatacgttccagttcctcctcgttgctgaaaggaatactgatttttcctttccccttttcggagcaagtcagttgtaccttggtgttgaaaaatcccgtgagttgttgctttagtaaattaaactcttccggtagtttgctgcgtttcggagtgattttccgtgtgccgcttttcacagcttctccttcgctcagcgatttgacaatctcttctactttgcggacggagtatccgtgttcctgtatctcttcgaatatttttacttgaagtttggggtcgcctaatgaaatcaatgcacgtgcatgtcccatatctagctgtttgttttgtagagccatctgtataggagccggcagtttcagcagacgcaggtagttggcgatagtggtccggttcttgccgatacgttcgctcaggcgttcctgtgtcagttcatactggtccagcagatgttgataagccaatgctatttctaccgcattcaggtcttcacgctgtatgttttcaatcagcgccatttccatcatgttttcgtcgtcggcagtgcggatgtaggcagggatggttttcagtcctgctttttgtgaagcacggtaacgacgctctcccgcgatgatctgatactcatcgtccgagagcttgcgtagagtgataggctgtatgataccgatttccgcaatggaatcagccagttcctgcaatgccgtttgatcgaattcgcggcgtggctgattggggttgacggtaatcttcgccaactctatttcactaatggaagaagaaccttcggttttcacatcatccattgagagcagggcgtcaagtccgcgtcctaatgcatttcttttttgtgttgccatatcttcttcggttatttatttctgttgataatctctttggcaagggcgagatggtttttggcaccggtagagtccgcatcataaagaatggtcgggataccgtagctgggagcctcgctcagtttcacatttcgctggatcacgctgttgaaaactaattcctggaagtgtcttttcacttcgtcgtaaatctggtttgcctgacgcagacgtgagtcatacatcgtcagcaggaaaccttcgatttccagagcgggattcagtttcgacttgatgattttaatcgtattcagcagtttgctgatgccttcgagagcaaaatactcagcttgcacggggatgatcacggagtcggctgccgtcagggcattgatggtaatcagtccgagtgaaggagaacaatctatcagaatatagtcatattctttcttcaagggtgtgagcacttctttcagtatcttttcgcggtttgggaggttcagcatttcaatctctgctcctacaagattgatgtgcgaagagatcactttcaaagagtcgatttctgtgtcaagaatagcgtcctgtacattggctctgtcaataatgcattcatagatagtgcattccgactgcttgatgtccactcccaggccggaagaggcatttgcttgcgggtctgcatctaccacgagtactttcttttcaagtgtagcaagtgacgctgcgagattaatcgtagtcgtggtctttcctacaccccctttttgattagccaaagcaattatttttcccatatactctaaatttattggcagcgaaataagtgataattccttagagcgcctacgaaaaaagagaaactttgcattttctgttgataagtcaccggttttgttaataactgccggacgaaacagttccgaaacctggttgattttatcatcatactttctctgtttgagcttgcaaatatacatatttatattggatatctatttctttttttactcgcttgcagaagattaagatttgtaaacgggtgtatattcgtcagatagcgatgtgattaatatgatattcggagataagcggttggcagtacggttactttttgctacttttgtgcgaacattaaaaaggaaaggattgaatatatggaaagtaagaagccgttgatcctcgtttcgaatgacgatggtgttatggctaaaggtattagtgaactggtgaagttccttcgtccgttgggggaaattgttgtaatggcacccgactctccgcgctccggcagcggcagtgcattgacggtgactcatccggttcattatcaactggtcaaaagagaagtgggactgactgtatataaatgtacaggaacgccgaccgattgtatcaagctggcattgggctcagtgctcgaccggaagcctgacctgatcgtaggcggtatcaatcatggagataattccgctattaacgtgcattattcaggaacgatgggagtagtgattgaaggctgtctgaagggaattccttcgattggtttttctctgtgcaatcatcagcccgatgctgattttgaaccttcgggtccttatatacgcaagatagctgccatgatattggaaaaaggactgcccccgttgacttgtcttaatgtgaactttcccgatactcccgacctcaaaggagtgaaggtttgtgaacaggcaaagggatgctgggtgaatgaatgggtaacttgtccccgtcttgatgaccataattacttttggctgaccggttcattcaccgatcatgaacttgaaaatgagaacaatgatcattgggcgctggaaaacggatatgtggctatcacgccaacgacagtcgatatgactgcttacggctttatagatgaactgaatggctattgtcagcaactggaattctgacatacgcattgtgctgatttcaaatatcaaaactcctaattcaaaattcccatgaagtactatctgattgtcggtgaagcttccggagacttgcatgcgtcccatttgatgactgccctcaaggcggaagatcctcaggccgatttccgctttttcggtggagatttgatggctgccgtcggaggaacgatggtgaagcattataaagagctggcgtatatgggatttattccagtactgcttcatttgcgtacgatttttgcaaatatgaaacgttgcaaggaagatattgtggcgtggaatcccgatgtggtgatcttggtcgattatcccggtttcaatcttaacatagctaagtttgtgcatttcgagacgcagattcctgtcttctattatatttctccgaagatatgggcatggaaggagtaccgcataaagaatatcaaacgtgatgtggatgaacttttctccattcttccttttgaagtggagttttttgaagagaagcaccggtatcctatacattatgtaggaaatcctacggtagatgaagtggctgcttatcagaaagctcatcctaaaaatccggaagcattcttggcggataataatctggaggataaaccggtaatcgcactgttggcgggaagccggaaacaggagatcaaggataatctgccggatatgctgaaagctgcttctgcttttcccgattatcaactggtactggccggtgctcccggcatcgctccggagtattacaaacaatatgtagggcaggctaaagtgaaaataatctttgaccagacctatcgtttgctacaacatgcggaggcggctttggtcacttcgggtacggcgactcttgagacagccttgttccgtgttcctcaggtggtttgttactatacaccgattggaaaagtggtttcgtttttgcgtcgtcatatcttgaaagtgaaatttatctcactagtcaatctgattgcaaatcgtgaggttgtaaaggagttggttgcagatacaatgacagtcggaaatatgcagagtgaactaaagaaactgattgaagatcaggaatataagggtcgtatgcttgccgaatatgagtatatggcagctcggttggggcctgcaggtgctccccagcatgctgctcgcaaaatgcttgaactgttgaaaaaataactttctttttctgaataaacgtaaagccggtgcagtaaatgcccggcttttttatttatatagcagaagaattaaaaagagaggaataaatatgaaaaaatttaattggcttttagtaatgttattgctcgcattggtacctgtgctgcaatcatgtgacgacgatgggtactcaattggagacataggatgggattgggctacagttcgtgctaccggtggcggtggttattatctggaaggtgatcgttggggtatgattgatccggtggccagctctattccttggtacaaaccggtagacggtgaacgagtagttgcttttttcaatcctttggctgatacggataagggtgctcaggtaaagatcgaaggaattcaggaagtgttgacaaaagaagtggaagatatgacggctgaaaatgaagaggaattcggtaatgatcctatcgtgatttatcaaggagatatgtggctgggaggaaagtttctgaatatcatcttccatcagtatttgcctcgttctgaaaagcaccgcatcagtcttgtacagaataagatagaaccggaagctccggaaacaccggaagctttgaaggtggatgaagatgggtatatacatctggaattacgttacaatacgtatgatgatgtgactggataccggggatggggacgagtttcttataatctggaagagttctatccaacggcaaaagatgcagctgaaacagaatttaaaggattcaaggtgattattaattcagaagaaaatggagaaggaagagtgatcgttcttgatttggatcatccggtaggcgttccggaaaaagcgaaaaatgtgcattctacttcttttgttaaatagcaaaacttttataaataactaaacctaaaccttgacgaacactgtgtgtgaaaaaaaaggtcggaagtgcttcaaagcggcttccgacctttttattttatttattctgttattaaaaccaagtcagtgcatatagataaaagactgctgccggtatagccatcaaagcactgtcgaagcggtcgagcatccctccatgtcccggaagaatgtttcccgaatctttaacgtgcagctggcgtttcagtaatgattctgtcaggtcaccccatgttccgaaaacgacaacgactaaagccagacctgcccattcccacattgacataatcgtgaaataatgtgccaagacaaaagaagctccgatagctactactccgccaccgatggaaccttcccatgattttttaggagaaatacgttcaaacaagcggtgtttgccaattaatgaaccgacacaatatgcacccgtatcactcagccaaaggaatataaagatagacaatggcaggatcggattgtagcttacgctgctatattccggatcagtatgaaatgccaagacattgagcaaggcaaacggcaggcctatataaagctggctgagcatggaatatgcccagttaagcattggacttgcctttttcagatacagctcactgatcatcaaatagagtagcagcagcaaataaggaatgaaaatcttggagtcggctgcatcgatacagaatcccatcactgcgaggaacaagtaagctcctcccagcatgataatggttttgtttacattgactccttctgcgcggctgttgattaactgtccgaattcatagattgtcagtgcactgatcgccatgaacagaatgccgaagctgaaagaattatagagtatacatcccactaaaatggcaacaaagagtatacccgtaatggcccgttttataaaattactaatcaaaatcttcgtgttttaattatttagattcggtagtttgttcttcctcattggattttgcttctatagtaacttttccttctacggttactttttttccttccgcagtgattttcgtttctgtagttgcttcttcctgagcagaatttttagcttcctcttctttgatttcttgttcttctgctttcagtttctcggcaagttctctttccgctctggcagcgtcctggctttctttggcagccatgatttcttccgagcgggatgcccacgggcgtttaccgaaaatacgttcgacgtcttcggcaaagatcacttctttgtcgatcagtaactgagccagtttattgtgtccttccatatgttcggacaaaatcttcttggcacgttcatattgctcgttcaccatccgtttcacttcttcgtcgatgagttcggctgttttttcgctatatggacggttgaaagaatattcctcattattataatagcataagttgggtagtttgtcactcatacctaaataagcaatcatgccgtatgcctgtttcgtaactctttcgaggtcgttcatggcaccggtagagatgcgtccgatgaacagatcttcggctgcacgtcctccgagggtagcacacatttcatcaagcatttgctctttagtagtgatctgacgttcttccggcagataccaggcggcacccaatgcacgtccgcggggaacaatcgttactttgatcaatggatttgcgtattccagcaaccacgaaatagaggcgtgtcctgcttcatgcaaggcaatcgagcgtctttccgcttctgtagtaatcttggtcttcttttccagaccaccgatgatacggtctaccgcatccagaaaatcctgcttgcctacaaatttctttccgtgacgggctgcgatcagcgcagcttcattgcagacattcgcaatgtccgcaccggagaatcccggagtctgacgtgccagcaaatctacatctactgtatcgtctatcttgatcgggcgcaggtgtacgccgaatacttctttacgttcgttaaggtcgggcaggtctacgtgtatctgacggtcgaaacgtccggcacgaagtaatgccttgtcaagtacgtccacacggttggtagcggcaaggataatcacaccactattggaaccgaagccgtccatttcagtcagcaactgattcagagtgttttcacgctcatcatttccacccattgccgggttttttccacgagcacggcctaccgcgtcaatttcatcgataaagacaatacaaggagctttttctttagcctgcttgaacaagtcacgtacgcgggaagcacctacaccgacaaacatttctacgaagtcggaacctgccagtgagaagaacggaacgtttgcttcgccggcaacagccttggcaagcaaggtcttaccggtgcccggagggcctacgagcaatgcgcctttgggaatcttacctcccaggtcagtatacttctgaggttctttcagaaactctacgatttcttctacttcctgttttgcttccgccaggccggctacatccttgaatgtaatcttgatggagcctcccttttcgaaaagctgggctttggattttcctacattgaatacaccgccggcaccaccgccgccaccgccgctcatacggcgcatgaagaatatccatagggcgattaataaaaccagtggaagaatattaatcaggattgccgggaaaatatccgaatcggcagggtaatctgcgattccgtcaaaatgaccggctgctttttcgtcctgcagaaatttatccagtctgtccttggaaggagggttactggtgataatcgggtttcttcccactttggtggagtccgcaccgaatattgcacctacggcattcggcttgacatgggcttcgagagttttctcagagcccagcactttgctgatgtagccgttagtgacatacttctggaagtcgctgtaaggaacgactttacttccgcttcctcttgaatcgctgctccaccaaaggccgagaagcatgagggcaataatcatatatagccagttcagattgaacttgggcatattcaccttattgttaggcttattgttattagtattattgttgtccataattgtggattagtctaaatcggggatttgagtaagtttggcgtcagcccacagatgttcaagattatagaaggatcttacttccggcagaaagacatgtacgagtacatcggaataatccattgccacccattctgcatttcggagtccgtcgattgcggtcggtttgctgtctgcacctttacgggcaaactccttgacagagtctacaatagcatttacctgactaggggagttcccctggcatataacgaaatatttgcagatggtatcttctatactggttaaatcagcaataatgatgtttttaccttttttttcctgaattccctctttaattttttcaattaatattttcgtatcgttcattcctgtaattgaaattaataattcatgttctcttttggtttataacaaaaaaggattcccctttgtttctgattataaacgtgatatttttgacaaatatacggtgatttattggatacaagaaagttatgacttaatttttgtgttttttaggggagatgcttctacttaagggagcaaaatgagagtttttgcaaaaaaaatagcagaaatgtttgcaattcccaaattatttgtatctttgcacccgcaaacgaaaatcattgggctatggtgtaatggtaacactacagattctggtcctgtcattcctggttcgaatccaggtagcccaacaaaccaccagctttttaatgacaaaaccccgctaaaactgcaattttagcggggtttttgttttttgtggtatactttcaagttggtaaggctcaaaaaaaagagtcttccaaaatgaatggaaaactctttttacatccgcaccgtttaggtgatgtttttctgcatctatgatgggatacctattgtgtctgtgttatgacatttggctgctaccaacccggattctgaacaagtttgctcgacttctgaatctcgtttaacgggataggatagaggtacatgcgtctttcaaaaatacgggtttcaaatgcggtacgctccataaagtcctccaggttatcggcattcatattcataccatgtaccggtccgccttgcttatatccttcttcatcggcacacatccagcgacggacgtcgaaatagcgttgtccttcggcgaatagttcgatccggcgttctttgcggatggcttcttcctgtaaggcttggttgccttttatttcaggcttgatgtcctttagtaaagggatacctgcccggtagcggacactgtcgatatgtgcaatgatacgttcatccgaaggatttacatggttcaacgcttcggcatataataaatagaagtcggcgagacggaacaacattcctgctctgtattttgatttggcattgcttccttggtttaaaagatcacggttcattcccttgtaaagcagatagccggagtagctcatatccgctttggagttatcgtctccgctgcctttatagaaataaatctgtttcgttgttttttgccatgtcttgccggagtaagttatggcctgataaaaacgtggttcgcgattcttatacatattaggaatgccgtcttcgccaatgccttcttctgaataaagtcctgactcgtgaatactcttgccgtcattcatgtagaaatcgtcaatggcttcctgcaatacacctacacaaccgaatccgctatatatcgcacgtggagtgcatctgcgttctcttccttctccacctacatcgccccatgaattcttgctggtttgccagatagcttccgggttgttcaaacttacctgaaagagttggtatagagattcttctgcattcaactctccgtctttatctttttctttataaaggtgatagtgagtttttgcataatcaatgaagcgctgcaacgcgtttaaggcagtttgccattttttgtcatctttcgcaggaaacagttgtttgtcctgattatccctcaatgcgattgcttccgaatatcctccgttaagtaaggggcttgcggcatacacgtggagttttgccagaatagccaatgctgcccctttggtaggtgctgcgcttcggttctcgtttggagtcccgtcatcgttcacttccttttcaggcagctcattgtagcattcattgagttcggaatcgatgaattgcactacttcgtcgacagagttccggtaatagtccagatcacttgcggacggttccgatatttctgtcataatggggatagggccatacaattcaaataacaagtagtgatagtaagcacgtaggaaacgagcttcgtttttcaatcttgccaattcgtcttcgtcaatgtaatccgtaacgtcgccttgctgtgggatcgtatgcgagtatgccagaaattcgtttgcctgacggatttgtttgtaaagactccagcgcgataaatccgccgatccggcatggtaacctactgtcggaattgtcttgacattattttgtgcactttttaactcgtcggaaactgccggccagggattatccaatcccgtcaaggctgcataagaactggttataataatgtttgatacatccggaattccggaatatatatatcggtggaagcgacgggcataaccggtattattgaatacttcttccatgcttaattctgccgccaggtcgtccgatacatccagataatcgctgcaacccgaaaagaatatcgtgcttagtcctacggccactatgattgatagttttttcaatgtcttcatatatataatgtattatatgtattattagaaagtaaagtcaagaccgaatgtgaaagtccggctcagtggatatgagaagccgccgttggtgtttccaagttccgggtcccacattttgatatcatcccatacacaaagattgtttccttgcagataaacacgcaaagcttgtataccgatttttttcagtgttttctccttgaagttgtaaccgacttcaatatttttcagtcgcaggaagctggcattgcgcagccaccaggtgctggcagctgtattgttatcataattggtagagtgcatgcgcgggaacattacattttggcttgggttctgttcggtccatctgttggctacttctgatcgtacagcggattcttcgactccccattggaacgggaaaaatgctccgttcgagctggctcctaatacggtcgatgtatttcctgatccttggaagaagataccgacataggctcctttccattcggcattgaggccgaagccataaactatttccggaacggaaggatttcctacatcttccatttggtcgttgctgtcgatcttaccgtctccgttcaggtctttgtatttgatatctcccgggcgtactccgcttgacaagccggatacaactcccgatttcagttcatactggcggttcagaccttcacctgttatgttgaagtcgtcggcggtataaagtccgtcagcaatgtatagtttccatgagttgaggcgagttcctttcttttcgagccacggatagacttgtggcacctgatcatattcgaggatttcgttgcgtgcaaatgtaaagttgccgcgtgcgctcaggtttacttcaccgactttataattgagattcagacttgcatccacaccctggtttttcacgataccgaagttttgccatggcatttgctggaagcctgtcacattggaaacggtattacgttgcaataggatgtccttacgtttgttgttgaagtagtccacttgcaggtcaatgcggttgtcgaataaccccaagtcgataccgaagttgcgtttgtcttcgatttcccaggaaagaaacggtgattcgaactgggcttcggtaattccattgcctactccgcccaatgcaccgctgttgctgaatccgatattatagccactattatcttgtttcatggttccacgatataagaagcggttgcctccggtatcgtcgttaccggtacggccgatggagaatcttagtttcaatttacttactacctttttcaaggcttccggataataatgttcattgctgatataccatgccaaacccatggcggggaagaaaccgaagcgatagccttttgcaaaggtttccgaaccggtgtagccgaagttaccttctaagaaatagcgtccgtcatatccataagttacacggcctaccaaaccttgctttctataaggtaaagcgttattgtgatactgtgtttctttttgcatgtataggaacatggcgcctagatcgtgtttctctgcaaatgtacggttgtaattgaatgctgtttcaaagtaaatctttttgtttgaactgttactcaggttttctgataatacatcgctgccttctactacagtcttatataacagtttgccattttcgtcgcgtcctgtggccagatattgtgtcggtgttttggtgcgtttggcgatatatgacatgtctgcgtcaaagctgatgaggcctttccatgtcaagcccttagtcaggaagtccagtttttgatctacttccacttttgattggatggaagttctccattctttggcgtatcctgagttaacaagcaggttgtacgggttggaacgattgcctgacggacggggatgtccggccacagttccgtcggaataaactgccggcatgatataagacggagtacggcacatggtagtaaaaatagtgctggttcctgttcccggataattggtttgcaggtattgtccgctgaggtctacttttactgttgtggttttagttgcgtcaaagtcaatgttgctgcgcagattgtagcgcttcaatccgatattgttatcatagtcattgccgaaatccttgaatataccattttcctgatagaaggcgccggatacgaagtaacgggcacgttcagttcctcctcttacgttcagggtataccgcatattataggtgtggtttcttagcattgtacccaaccagtcagtgtccggatataaatcacggtcggctccgggaccgtatttggctatctcttcgtctgtgcgtatgctggcggtcccttcgttgttcaatgcttcgttgtataggttcaacgtttctactgagttcatgaaagtcggcagacgtgttggttcgagaatagttccttcggctcggaaagagattttaggtttctgtgaatttcctcgtttggaagtaatcaagataactccgtttgcgccttcggctccgtaaacagctgtggcggcagcatctttcagtaaggtaaatgattcaatttcatccgcttcaatatcctgcatttgccgggggacaccgtcgactaatacaagcggattggtaccgcctttgaaagaactttgtccccgaatccagaagtcggcattgtcatatcccggttcaccggaacgttgcactgcgatcaagcccggtacttgccctgccagattattggtcatattacgactggaagaaacggacaactctttgggaccgatggcgttgatggaacttactacgctgttcttcttttgttttccgtagccgataacaacgacgtcctccagcatctctgtgctcggaagcattttgattgctaataccttttctcctttataagtgattttttgctgttcgtaacccacataagagaaaagaagtatattgcctttttgggctttgatggtgaaattaccatctacgtcagtgatggcaccgactgtggttccttcgatttttatctgcactccgatcatcggctgcccgttttcatcgactacgagtcctgtcggactttgtccttgtgcataaatagtgtttattcctgcaaataaggcaaacagaatgaaacacattacttttaatatcttattcataaatgtttcttttaagtaagaattagaaaataattaaggttacttgtccgtgccgtatacatatatttctgccaggtgtcctacagatgaaccactgcccagagtggggatgtaaatacgtatccagcgtgcatcacatgcttttacggggaccatttgctctgtttttatgctaccgtcaaagaagtattttccaatcaggttccatgtttcaccgtcatctcctgcataaatctcaaggttcatagaagttagtgcattttgtctggcgatgagtcctaattggctgacactgttctctttgcccatgtcgagtattatttcgtatggtggagctacttctcctccctgccatttactatgccagaaagtgtttatctctccgtcaatcaaagatattgtctgaccgttgtgggggtaagcggctgaaacttcgcctgtcttttcttccgtgttggcagtcactgtccagtggtcacggttaatagggccgccttgtttgattacgaaatagttggctaccgtttccttgtctatgttgatgctggcgtctccttgtccgctaagtccgccgagtgaaaccggaagaagataatttccggggggaagtgtttcacccagcagactaatagcagagcctcccgttgtctttcccttggcgatagtgacatcgggaagagtgtagaagtcggaaggtaaagatatgtaataggtcgaatttgccgaattgtagttgtccacatagtccgctcctttggttgcaaacgaggtcgtcagatcccattcgttctcaaagcttatctctgtgtcgagattcataggtgaagtagttgttcctccttctactacgaagtctcctccggtagatgcaagtctgacgatggcttctttaacgataaatccgtaaagcgttgccgttcggtcggagttcataggagtccctgtagaggatacccgtaatggaagaacgtatttaagttcatcaaagccgcacaggttgtagattttgtgaggatcatacaccagactgcctcctgttacgcgcctgtctccgccaggagagacggaataggttgcattttcaatcgtatagcattcgggaggtagtaattgataggaagtgccgtccgcattattcagagaatccaacagggattgttctactgaaaaagtcaccgttcctccggtatcctctaatcctgccttggcaatggatagatcaatcttgttgagagggcctaaatcgtaaacttcaatggtggagaatccactttgtgatgctgagaacattcccttagaacgttcgttatcaacatcttctatgcagctggtaatgcataagaatgccagcaagcatggtgttagttcaaagcattttttcataaattaatattagttttattaaaggtaaaaagggtaaaaacaagttgaagtacttgtgggtactcttggatttggaatacttatttctttctcataggcattaaaattagaagttaaaacttttatttgtgtgctgaactatgctgatttaaagtcaaaaaaataataagttctatatcttagttcttgtagaactataatatagtagatgataagatggaatagaatgcatgttgttgataatcaatggggaatattgggggatgtaaacgtgtaatagtgaaatactcactctgtttctacccgttgattgattaaatgagaataaatgaaaaacttatttgtcatttaaatatgaaatattcttgaaaaatagtatgactttttcaaactaattagtatatttgcgcacgaatcgttgatttttagcaaaaaagatggtaaatctattgcttagttagatgcgttagtttagatacaaatggattaacagactgttttttgtgctaagttctacaagaacttagtttaattattcctctattcctttttaattggttgattgtttcggtcagaccgggcgaaaaactcacttcttaaatataaagcattttggcagtcgtttaattacgggtgtaagggagaaaatatttaattgctatttggatagtacacagcgtgatagaggttgttatattctcaaagagttctcatgcctttgagaaaaaattctcaccacactgagaaaaaattctcaatgcaatgagaaaattttctcaaaggcatgagtattttttctcagtgcagtgagaatataatgaaagcttcaataaaaaagccaactaaatccataatgggttagttggcttttatattagaggatttatcctttgtttcgggaatatttattcttccgctttcaatgattcatcgataaccttgattttctgtaataccagttcaaggtcagctttcagtttatccacttttcgattcagttcagtcagcaggctgctacctttcttggaagaagaagtaaggaatcccaggttattttcataagtctgaagttcattcttcatattctcataaatacgtaccagtttttcccgttctctatataaagactgagagcctcctccttggatattgctgatgtttgaacggaaattgcttaatttcttgttggatgcactgatgttgaaacggtcgaacagttgatcgatcaagccatgatattgcttatacaatttgtctttctccttgaacggaacatgaccgatggtattccactccttcatcagttcgcgtaccaaagtgctggcttcgtcagtatccatgttttcatcgattgaagctaatttttcaatcaacgctttcttcttctccatgttctctatttctacagaacgttgtgaagaagtagccttgtttttctggtcgaagaaatagtcacaggcagtgatgaaacgtttccatacggcatccgagtatttcttggctaccggaccgattgttttccactctttctgcaatttggtcagcgcatcagcagttgctttccagtcggtgctgtccttaagtgcttctgccttttcgcaaagtgctttcttcttttccagattctcgttcattccttctttcagagccttgaagaattctcctttctttttgaagaagtcatcgcaggcatgacggaagcgttcgaagatcttcacattcatcttttggggagcgaatccgattgtcttccatttgttttgcagagcaatcacttcctgcgtcttgttctcccaagccgagaatgttttcagttcatcatattcaattgcttctacaatttcgcaaatgacagttttttgatccagattgtgctgttccgattctttcagcgcttcgaaatgttgctggtgacggcggtttacagccgtagaagcagccttgaaacggttccagatttcgtcacgcagttctttagctaccggacccgtatcacgaaattcctgatgcagcttctgaagttggtggaaagcggaaactacatcttcttcgtcagcaagcttttcggctgcttcgcaaagatgagtcttgatctccagattctttttgaagtcgtattcacgaaattcgttgttcagtttcagcagatcatagaatttctctacgtacagttggtaattcttccaaagttcattcaccttgccctgcggaaccagtttggtttcgttccattgttgttgcagctttttgaactccgtataagatttattggcatcatcacccgattctaccagttctttaagttcttcgataatggaaagcttgacttgcagattttcttctttctgacgttcctgttcggctacaagttgacttcttttctctttgatcgatcccatgaggcgtttgaattcctcttctgtcggatcatccttcggagtgaagtcttcggcaacgcctccgttgtcgataaattgctttttagcagcttctaactcggcgttgtgtaacttgtagaatgattgttttagattgtcaatttcctgcttgtttgcgttttccgagtcttgcgcaagctctttcaatcggttcagtacgtcttcctttgtggcaggtttaggtgctgcttcagtctgaacttcggcagtaacttcttcagtaactttttcggtaccttcttcagtcggagtctctgtaatggcttcagaaacctcaactgttttcttttcttcttctaactccccttggttcaagggaagattagtgtcatgagcgtccatcattgtatattagttttgggtcacaaaataatgaaataaaacgattacttcatactcttttgcttatttttttttgattatcgcatttttatgataataaaacagtaattcccatgtacagcatcataccgattatgtcatttgtgatggctataaacggacctgttgcgatggcgggatctatttttagtttctccagtgtcatcgggaccagtgtgccgaagatggaggcgaacatcacaacggcaaacaggctgatggatacggaataagtaaccgtagccgtcgcaccgaaccggataaagttgtaggtatataccagcagggagatgatggtagcattgattaaggctactaccgcttccttggtcacttgcttgaaagtgtttttggcgtccagcgaactgttggcaagcccttgtacgatgatagcggaagactgtgtaccgacgtttcctcccgtaccgccaatcagcggaatgtataatgccatttcggggtgtgcggcaaaggttgcgtcgaaatttcccaatatcatggagttgccgattccaccgatcatgccgatcagtagccacggcagtcgggctgtggtctgtcttagtacgttgtcatcggtttctacgtcctgcgaaagaccggatgccaactggtaatcacgttccgactgttcacgaacttcgtccatgacgtcgtcgacggtgatctgtcctatcagtcggccgatgctatccaccacggggatggcaacaaggtcatacttttcgatggtttgcgccacttcgtcgatggaagtgtctacgtgtacggagatcgggtctttctgcatcacgtgtttcactttggagacagaaggggaggtgatcatcttcttgagcgggaagattcccctcaggcgttcatcgtcgtcaatgacatatacataatatatttcgtccagttcttcggcttgctgacgcatttccttcagacattcgggcatactccagttctcgttcacgactaccatttcggtgcccatcagaccaccggcggtgttttcgtcatatttcaagaggtccacgatgtctcctgcctgttcgatgtcttcgatgtgcgaaagaatttcttcctgcttgtcttcgtcgagatcacgcatcaggtctacggcatcatccgtgtccatgtagtccacaaagcgcttggcgattgtttccgaagggatcatttcgaggaactctttacgaacgtcctcatccatttcgacgagtacgtcggccgcggtttcattgttgagcaggcggtagacaaaccgggcttcttccgggttcaggtcatcacacaattcagcgatgtcggcgggatgaaggtcgacaagaagttctttaaccttatcggcatctttttgctcgataaggtgttttacgttgtcaatgtattcctcgttcatctttttgtttacgattaaacgttttacaaattacggttttcgctcactatcggtcagttaccggatgcggtggctgttttcagcgcttcttccacctggttggtcagactgatgaattcttccaccgacagttgttccgggcgcttgttaaataatgcatcctccgtcagcggacagtctttgcctaaaatcggcttgatagagttgcgtaatgttttgcgccgttggttgaaggtggtcttcaccacttgtttgaacagtttttcgtcgcatcccagttccttggtatcattgcgggtcatgcggatgacggcgcttttcacttttgggggcgggttgaaaacatgttcgctgacggtaaagagatattctactttataccatgcctgtatcagtacgctcaggatgccgtaggttttgctgcccggtccggcagcgatacgttcggctacttctttctgtatcattccggtacagcaagggatgatgtccttgttttccagcatcttgaaaaatatctggctggagatgttgtacgggtaattaccggtcagtacgaaaggctttccgtcgaacaaccggtgaaggttcattttcagaaaatcgtcttcgataatgtgatcctccagtgacggataggcttcacggagataggcaaccgattcgtagtctacttcaacgacttttaccaaccggtctttttttaccagaaactgggtcaatactcccatacccggtcctacctccaatacaggcagttcggggaaggtgtcgactgtatcggcaatatcctgcgctactttcagatctttcagaaagtgctgtccgagaaactttttaggctttactaatttcatttaccaactaaataattacttttgcagccgacaaaggtaattcttttaaatgaagaatgaagaattaaggatgaagaaactactaaaaaagacgctgaagctgatattaccgatcgttttaggcggctttattctatactgggtttatcgcgactttgatttcagcagggtcggcgaggtattacggcatggtacgaactggtggtggatgcttttttcgctcttgttcggggtgcttgctcaggtatttcgcgggtggcggtggcggcagacgctggagccgctggatgctttccccagaagaagcgactgtgtgaatgccatctttatttcttatgccgccagcttggtcgttccccggataggggaggtgagtcgttgcggggtgttggcgaagtatgataatgtctcgtttgccaaatcgctggggacagtggtgacggagcgactggtagatacattgaccatttttctgattaccggcattactgtattgctgcaaatgccggtgtttgtcactttccttgaaaatacggggaccaagataccttcttttgcttatcttttgacttcggtatggttttatatcgtcttgttttgttttatcggggtggtggtgcttctttattatttaaggaaaacgctatttttctatgaacgggtgaaaggctttgtgttgaatatttgggaaggaatcatgtctttgaaaggagtacgcaatattcctttgttcatattttatacattggccatctgggcttgttatttttttcatttctattttacgttctattgttttgcattcactgctcatttgggcattcttgcggcactggtaatgtttgtcggcggtacgtttgctgttattgtaccgactcccaacggggcaggaccgtggcattttgctatcatggagatgatgatgctttacggagtaaatgtgacggatgccggaatatttgctctaattgtgcatggtattcaaacttttttggtagttttgttgggtgtatatggtttggcggctttgccgtttaccaatagacagcgaaagtaatcacttaataaaaatagatttgttatgagtactattctttctttagctccacagaatgtgtggaagcatttttattcgttgactcagattccccgtccgtccggacacatggagaaagtgactgaatttctgattaacttcggaaaaggcttgggactggaatctttcgtagacgaagtgggtaatgtgattatccgtaaaccggcaactccgggcatggaaaaccggaaaggtgtaattcttcaggcacatatggatatggttcctcagaagaataatgatacggttcatgattttgaaaaagatcctatcgaaacttatatagacggtgactgggtaaaagccaaaggtactacgctgggtgctgataacggactgggtgtagctgctatcatggctgtactggaagcgaatgatctgaaacacggtccgctggaagcattgatcactaaagatgaagaaaccggaatgtacggtgcattcggcttgaaaccgggtacggtaaacggagaaatcctgctgaatcttgactctgaggacgaaggcgaactgtatatcggttgtgccggcggtatggatgtgactgctacgctggaatataaggaagtagctcccgaagaaggcgacgtcgctgttaaagtaagtctgaaaggtttgcgtggtggacactctggattggaaatcaatgaagggcgcgccaatgccaataagctgttggtacgtttcgtacgtgaagcggttgccagctatgaagcccgcctggtaagctgggacggtggtaatatgcgcaatgcgattcctcgtgaagcatgtgcggtacttgccattcctgctgaaaacgaagaggaactgctgggcttggtgaaatattgcgaagacttgttcaatgaagagttctctgcaatcgaaactccgatcagctttacggcagaacgtgtggaactgcctgccggtgaagtgcccgaagaaattcaggataatctgattgatgccatctttgcttgtcagaatggtgtgactcgtatgattccgaccgttcctgataccgtggaaacatcttctaatctggctatcattacgattggcggtggtaaggctgagattaagattctggcccgtagctccagcgatagtatgaaagagtatctgactaccagtcttgagtcttgcttctctatggcaggcatgaaggtagaaatgactggcggctattctggatggcagccaaacgttgaatcgcctattttgcatgcgatgaaggaatcttataaacagcagtttggagtagaacccgcagtgaaagtaattcatgcaggtttggaatgtggtattatcggtgctatcattccggggttggatatgatttcatttggtccgacattgcgttcgccgcactcaccggatgaaagagctttgattcctaccgtacagaagttctatgacttcctggtggctacattagcacagactccgacgaaataaggattcttttcctatttatatataggtatcatatagtaaaaaggcatggaagattatcttccgtgcctttttgtcatatttgctgccattgaaattataattctgccttataacaaataaattaattgatgcaaatcaattaatatgctataaaacataaatttctttcctttttcggctcaatctataaacaatggtcgtatttttgtgttataaaacatgtaattaggaggataacaaaatgaaaaagttagaaagattgtttagaaagatcggcaatgccgatgtacatgtttggggatactcaacacttggcatactccccaaagagaagatttaagttttttagttttcaggtattagtaattttaaaggtttaaagattatggcaaagaaaatgagttcattaattagaaaaatcctcagtgaagtaggtcgcaacgaaatgctttcatgggggtacagaattgaaaaatgagattcagtacattaactaagcttgagtggggatgcgttattgaaaacgttatccccactttttattctgtcatttaggctgtatagtggttaatccgcgttctttatctttctgttttccatgttccgatagttcttgtcgcactatcaaagtttacccccacttttattattttccagtctcccacctgatagggaatggcatactccttactattaatctgcgccaatgcttcttccggtgtaccgtccactttaaattcaaagacataaagggtatcttgtaattttacaatggcgtcagcccttccgatagctgtatctacttccacatctatatattgccccatcagcctgaaaaatagatagaagatggtttggtaatgtttctcttctttattatttaacttattagggatagaagcgaagaaggactttagtctttccaggcatccatccaaatttccggcacgtaagtctttaataaatgatactatataaaatgtattctctcgtgcgggcaaatgtacataagcaggcatgagagattcgagaaatcctttcctgacttccttgttggggtaagctagggtatagagctgaaaactcgggtcatatcctttaatagtgagatagccgctttgataaagtactggaagagggtcggtaattctattagtgggagcatcaaattgttctgctgtagcagtagtgtcatccaactcacggatatcaaagttactttcttgcaggagatctatcaaaaaagtgggagtaccggtagaaaaccaaaaattctcataacttttttgggcaaatgcgttgaataaactaaacggattataaatgtctttgctattcttactaaaatgatatccgtcatattgttgtttcagatgagtacaagcttcttcatatgtttcgttattggcttgagccatctgttcgatatcgatttgcagtgtgtgtacctcttgttcggtaatgccgcatatagcgctatattcatcccacatactgatattttgcaagttgttcagttcgctaaagatactcatttgactgaatttgctgatacctgtgataaaaaggaaacggatatattggccttgcgctttcaaagggctgaagaaatcgcgcataatatcacgaatttctatttgcaattccgtattgttattactgtccagcatgggagcatcatattcatctacaagtatcacaaccggtttgccggtctgtgtatatgcgcgttgtatgattccctttaaacgaaggctgaaagtcgtttctccttcttcgcgtccatataatttttcccattgcagtaactggtaattaatgacggctgataacgcttcggcagtcatatatttactcacactgaaatcaatatgtagcaccggataaacagcccattctttttccagagtttccattgccaatccgttgaacaagtctttctttccggaaaaataagcttcgagtgtagatactagcagacttttcccgaatcgtcggggacggcttaaaaaataaaccttatttgtgtttgtcaaacggtaaattaactccgttttatcaacgtacacataaccattatttcgcaaatcttcgaaattctgtattcctatcgggtatcgtctgaatctctcgtccatctaaattacatttttatatgaaacatagacaaagatagaactaaataggggaaaatcaaagatcaaaaagtatattgttgttttcttccatttttattttcgtatttcttttcacataatatactcttgttttcttcccatattacgatacattcttttagctcctcacctgttttatttctatttgtgtatatatcggtctcatggtgaaaaaatgaccttcttaaaaagggaatatttaaacagtcaggaaggcgctaatgccaacatcatataaatatagaatgaaaaagcttcggcatttgtaactatgatatttactctttttatgaattggatggttttgtgattaaattgaagctgtcttgatcttaaactggttatttggtaactttattgaaatttgatgattcattatgctattgttatcatgtttgttattgtcgataaactagagaaaaatagcctccctatgcctcttttattacttttttgccggtgataaataagttcctcggtgaggaaagagtcgttggtttaaaaggaacatcccgttggttttaaaccaacgaaggttttgttggtaagaaaagatgcatatttcacgtacctttatgtaatattagtctatgtttctgcatattattacacttatttatgcgaattatttgctggttcactattttttgatcaactgaatttctaatataatcttaaaaatcgaacattgctgtctctttttcaaatttggtatcagatgaaataagacaattattgaaaattaattgaaaaagaataaatctttaaacttttattccttactttgttatttatacagatatatatcaaacttaaactggaaagattatgaaaataaggcagatttgtatgctggtgctattatgtctgggagtgattccggcagtgcaggcacaaacttacgacaaattatggaaacaagtggagcaggcagaaaagaagagcctgcctgagactgtgataaaactgactggcgagatttatcagaaaggggagaaagaaaagaactctccacaaatgctgaaagcgtatatgtggcggatgagataccgggatatgctgaccccagatagcctgtatacgaacctgaatggtttggaactgtgggcaaagcaaactgaccaacccatggaccgagctgtattacattcgctgatagccgagatttattcaatgtatgcttttaacaatcaatggcaactccggcaacggacagagattgtaggtgaagctccttcggcagatatgagggagtggacagcaaacatgtttgtagagaaagtgagaacaaacgtaagggaagcaatggcggattccgtactattgcttaacacatcttcacgtacttatattccttttgttgagttgggcgaaacaagtgaatactatcatcatgatatgtatcatctgctggctccccgcggtattatagctttacagcaggtagcgggattggatcgtgccactccggtggaagatatttcggaagattcgtctgctgaaaaagaatcttcggtgaaacaggatattatagcaatttatggaaatatgattgctgcttataaagcatccggtttgaaagaaggctatgtgttgacagcgctcagctatttagagtggagacgtgattcagatagaaacatccggcctttcggactgaagaaaggattgtcgggattaacagaagatacctacgttactgcactgaatgaactgaaaagcagatttaaatcagagagtatttgtgctgaagtttatttggcccaggctcgctatgcgattgaaaaagaacagcaaacgtcagctttgcagctttgtgatgaggccatccgtttataccccggttatcgtagaattaacgctctgaagaatttgcgcgaagatatcctgtcaccgtttctgaatgtaactgcggctgcaacagctttccctggtgaggaaatcgaaataagagcttcgcacaagaatctggatggatttacacttcgtctttatcaggcaaagaagttgataaaggaacagcactttgcagttcttcgtcccgaagactaccggacgcaggatacggtatttacctttaaagcgccggaagtcggacaatatgtaatgcgtatcgttccggatattcgtgccaagagagacagtgaaagcaaattcaatgtgacacgtttcaaagtattgacctgccgtttaccgggaaatcaatatgaggtagtgacgctggacggacaaacgggacaccctataccgaatgcgaaaataactctttatacgaatgacgaaaaagtattgcaggaatatacaaccggggcagatggcaaagttgtcttcccctggaaatccgaatacagatatttgaaagctgctaaaggtatcgataccggtatgccgtttcaaagcatttacggtggaagttatggatattacggagatgaaaacaaggtctccgaaggaatgactttgttgacggaccgttctttgtaccgtcccggtcagaccgtatatgtgaaaggaattgcctatgtacagaaatctgatacggcagatgtacttccgaacaaggactatactgttgttttgatggatgcaaataatcaggaagttggacagaaagcggttcgtaccaatgaattcggctcgtttactgtcgattttgcattgccatccgcttgtctgaatgggatgttttcgttgaaagccggcgagggaagaacgaatattcgcgtggaggactataaacgtccgacgtttgatattactttcgacaagcaacagggcagttatcaattgggcgataaggtagaggtgaaaggtaagatacagtcttatagcggtgtgttgctgcaagaccttccggtaaaatatacagtgaagcgttctgttgtcgatctttggagactggcggaaagtacgcagattgcttccggtgaggtaattgccaatgaggacggggaatttacgattccggtttttttggaagaaaataacgcctataagaataataccagaatctattaccgctactcgatagaggctactgcaaccaatgtagcaggtgaaacacagtcgtctacagatgtgatagcagcaggtaaccgttcactgactctacaaacagaattaaaagagaagacctgtaagaatcaaccgtttaacactgtatttaaggtacagaatctgaatgggcagcctgttgaagtaaaaggtacattctccctctatcaggcgaaagatgcggacttcaagcaactggacgagaatccggctgcaacaggtacatttacttccaacgaagaaatgacgattgagtggggaaaccttccttccggaccgtatgtgttgaaagctgtcgtaaaagatggacagggcaaagaagtgacggctgaggccaacaccattcttttctcccgcgaagataaccgtccgccggtagaaacgaccgtttggttctatgaggcaaatacggaatttgatgcaacgcatccggccgtgttctgcttcggaacttcgaaaaaagatgcttatgtgatgatgaatgtattttccggtaataagttgctggaaagcaagactatgaatctgtccgacacaattgtacattttaaatatccatatcaggaaagctatggtgacggagtactggtaagtttctgtatggtaagagacggacaagtctatcaggaacaggcaaggctgaaaaagcgtctgccggacaagacattgaccatgaaatgggaagtattccgtgataaactgcgtcccggacagaaagaagaatggaaactgactattaagacaccgcagggacaggctgccgaggcagaaatgctagcaactatgtacgatgcttcgctggataagatatggaatagaaaacagaatttcagtgtattctataatcagatcatcccttattctagttggatgggcggatatttcggtaataattcgttcaattactggtggaataataaatacttcaaagtaccgacaatggaatatgactattttgtgacgcagggaacgatgtcgatggaccaggcgttgaatggaatggtgccgggagtgatggtcagaggatatggcgtgcaaaagcaggcctcaatgacgggcagtatgatgatacggggcgtttcgagaagtaaggcggaagcaaaatatgtacctgctttggctggaagtgttgctgaggatgcggtatttgaatcagagttagtgtcagtagaggcaggcaagcaggacagcgcatccgaagaagaaacccttcccgaagctcccgccgatttgcgtacgaaccttgcggaaacagccttcttctacccgcaacttcgtaccaatgaacaaggcgaagtttccttctccttcactatgcccgaaagcctgacccgctggaacttccgcggttactctcataccaaaggtatgctgatgggtacactggacggtgaagccactacaagcaaagaatttatgctgactcctaatctgcctcgtttcgtacgtgtcggagataagacatctgttgccgcctccatttccaacatgaccggaaagccgcaggccggtacggtgagcatgattctctttgatccgatgacggaaaaggtaatcagcacacaaaaacagaagtttaccgtagaggccggaaagacaatcggcgtcagtttcatgtttaccgtgagtgataaatacgagatactgggatgccggatgatagccgacagcggtaccttcagtgatggtgaacagcagctacttcccgtgcttagtaataaagagcatctggtagaaacgcttccgatgcctgtccgtggagaagaaacacgtactttctctcttgacagcctgttcaatcatcatagtaagacggcaaccgaccgtaaactaaccgttgaatttaccggaaatcctgcctggtatgctattcaggcattgccttcattgagccttccggaaaataataatgccatttcgtgggctaccgcttactacgcaaatacactggcttcctacatcatgaacagccagccacgtattaaagccgtattcgatagctggaagctacaggggggaaccaaagaaaccttcctgagcaacctgcaaaagaaccaggaagtgaagaatatcctgttatccgaatctccgtgggtactcgaagcgcaaacggaagaacagcagaaagaacgtatcgccactctgttcgatctgaacaatatccgtagcaacaacattgccgcattgacaagattacaggagttgcagaattcaagcggagcatggtcgtggtataaaggtatgaccggtagccgttacgtcactacctacattgccgaattgaatgcccgtctggctatgatgacgggtgaacaaccaagcggcacggcgcttgccttgcagaagaatgcctttacctatctccatcaggaagctctgaaggaatatagagaaattctcaaagcacagaaagacggtgtgaagtttacaggtgtttccggaagtatcttgcaatatctatatctgatcgctctgtccggcgaacaagttccggcttccaataaagccgcctatacttattatctgtccaagataggcgaaatgcttccgaccgcttcgatggatacgaaagcgattgccgctatcattctggataaggccggacggaagaaagaagctcaggagttcatcgcttcactgaaagaacatctgacgaaaacggacgaacagggaatgttcttcgccttcaatgaaaatccctattcctggggtggaatgaaaatgcaggctcatgtagacgtaatggaagcactggaactgacaggcggaaataacgataccgtagaagaaatgaaactctggctgctcaaacagaaacagacccaacagtggaattctccggtagctactgccgatgctgtctatgccttactgatgaaaggcgtaaacctgctcgacaatcagggagacgtgcgtattgtcattgccaatgaagtgctggaaactgtctctccaagcaagactaccgtaccgggactgggctatatcaaacgctcgtttacacagaagaatgtagtggacgcccgtaagatagaagtcgaaaagagaaatccgggcattgcgtggggagccgtttatgcggaatatgaatcacccatcaaggatgtgagacaacagggaggagaactgaatgtgcaaaagcaactgtatgtggaacgtatggtgaacaatgctcctcaactacagcctattacagaaaagaccgttcttcaggtaggcgataaagtagtttcccgtttgagcattcgtgcagaccgtgcgatggacttcgtacagttgaaagaccagcggggcgcctgcttcgaaccgatcggcagcgtatccggttacaactggagtaatggaatcggctattacgtagacatcaaggatgcttccaccaatttcttctttgatcatttaggaaaaggagtgtatgtgttggagcatagctatcgtatcagcagagtaggaacctatgagacaggtttggcaaccatgcaatgcgcctatgcgccggaatacgcttcgcactcggcttcgatgacaattattattaaataacgcacagagaagatttcttctccaccggtgagcagggcactcgccaccgatgaggaaggtgttccccaccgatgaaggctgccttcatcggtggggaactttttgttgatgaatactgcgctgcaggagttgtcacagggtaaagtattttctcaaacggtgttaatctatgtaatctgtgatgaaaaactcatctaaaactcctacatttgtggaccaaaataaaatatatcacatgaaacgtactttactattgatatttactctgcttactgtcactttggcggctgttgcccaaccccgtatttcctctaacaaggagacgcacaactttggacaaatagaatggaaaaagccggtaacagtagaatataccatcaccaataccggaaacgagccgttggtgctgaccaatgtcacgacatcctgtgcctgtgccgtagccgactggacaaaggaacccattgctccgggtgccaaaggaactgtgaaagcctcttttgacgcgaaagcgctgggacgttttgacaagtcgataggcatatacagcaatgccactccgaatctggtttatctgaaattcaccggtgaggtagtgcaggaaatcaaagattattcaaaacttcttccgtatgccatcggcaatatccgcattgaccgtgacgagttctccttccccgatgtctatcgcggacagcaaccgtccatgacgttcagcattgccaatctttccgaccgtccgtacgaaccggtattgatgcacctgcctccttatctgaagatggaagcggaacctaaagtactgctgaaaggtaaaaaaggaacgatcaagctgacactggatgccagccagctgcaggacttcggactgacacagacctctgtctacctgtcccgtttctccggtgataaagtgagtgaagacaatgagatacccgtttcggccattcttcttcctgatttctcgcgtatgacggagaaagattctttgaatgctccttccatccacatctcggagacgaatattgacctgagtattccgttgatcaagaagaataaagtcagccatgatatattgatcgctaatgcgggcaaaaccccgttggtcatcagcaagctacaggtattcaactcttctgtaggagtaagactgaaaaagacggtcattccgccggacggaatgaccaagttgaaagtgacgatccacaagcgggatgtaggtaataagaaacatcatttacgtatcttgatgattacaaacgacccgttgcgtccgaaagttgaaataaatatcaaacgctaactcttattatcatggaacatcctgaaaataacgaagaatataaaggactcgttgtcaataaaggcatcgaacagccctcatccgtgaatccttatttgaaacgtaagcccaaaaagcgtcagctttcggtagcggaatttgtagaaggtattgtgaaaggcgatgtcactattctcagtcaggctgtgacactggtagagagcgtgaagcccgaacatcaggctgtcgcccaggaagtgatcgagaagtgtctgccttattccggcaattctatccgtgtaggtatcagtggagtgcccggtgcgggaaagagtacctcgattgacgtattcggtctgcatgtgctcgaaaaaggcggtaagttggcggtgctggctatcgaccctagcagtgagcgcagtaaaggcagtatcctgggagacaagacacgtatggaacaactttccgtacatcccaaatcgtttatccgccccagcccttcagcaggttcgttgggaggagttgcccggaagacccgtgaaacgattgtgctttgtgaggctgccggatttgataaaatctttgtagaaaccgttggagtgggacagagcgaaacggctgttcattctatggtagatttcttcctgctgattcagttggcaggtacgggagatgaattgcaaggcatcaaacgaggaatcatggagatggcggacggtattgtcatcaacaaagccgacggagataatctggaacctgccaagttggctgccagtcagttccgtaatgcgctgcatctgtttccggctcccgaatcgggatggattccgaaggtgctgacttactccggtttttataatatcggcgtgaaggaaatctgggacatggtgtatgaatatatcgatttcgtgaagaagaacggttattttgactatcgccgtaatgaacagagtaagtactggatgtacgaaacgatcaatgaacagctccgtgatagcttctatcacaatcctcggattgaagcgatgcttcaggagaaggaacaacaagtgctgcagggaaatcttacttcgtttatcgctgctaagagcctgctggatacctattttgacgaattaaaacgatgataaagcagaaacagtgatggattagaaaaacgaccgaacatttacccccgataactataccctaattaataaccaattgttaactttaacacctgatgaacaaaaccttattaactgggcttttgtgttgtagtttgtcaatacagagctttgcagaccaaccgttagaaggattcacctatggttcggtgaatgctcctacaggaaaagagtgggaatctcccgaaaacctggcgctcaacaaagagcagccgcatgcttatttctttccgttccagcatttggataatgcccgcaaggtattgccggaaaacagtaagttctggcagtcacttgacggtgactggaagttccattgggcacccgaccccgactcccgccccaaagatttctatcagactgagtatgatgtcagctcatgggatgcgattcccgtaccttcaagctggaatatttatggcattcaaaaggacggaagccagaagtacggaacgcctatctacgtcaaccaaccggtaatcttccagcacagcgtgaaggtggatgactggcgcggaggcgtgatgcgtactcctcctgccaactggactacttacaaggatcggaacgaagtaggttccttccgccgtgatttcgaaatcccgcaggactgggacggacgcgaagtctttatcagcttcgatggtgtcgattcattcttctatctgtggatcaacggtcagtacgtaggtttctccaagaattcgcgtaataccgctaatttcaatatcactccctatttacagaaaggcaagaacaccgtagccgccgaagtgtatcgtagttcggacggttccttcctcgaagcgcaggatatgttccgtctgccgggcatcttccgtacggttgccttgtactcggttcccaaagttcatttccgtgacttggttgccacacccgatttggatgcgacttatacggacggttcgctgactgtcaatgccgaaatccgtaatctggataagaaagccatcaaagactacaaggtatattactctttatatgccaacaaactgtattctgatgagaataccttggtagacggattcttatctcctgtgatcgacaaaatcgctccgaatgaaaccggtagtgttcagactgttcttaaggtaaaggctcctaataagtggtcggctgaatttccgtatcgctacacgttggtagccgaattgaaggataagaagaacagaaccgttgaaatggtttccaccattgtcggtttccgcaaagtggagattaaggatactcctgcctccgaagatgaattcggacttgccggacgttattattatgtgaacggaaagacggtcaaactgaaaggagtgaaccgccacgaatccaatccgggagtagggcacgccattacccgtgagatgatggaaaaagagattatgctgatgaagcgtgccaacatcaatcatgtacgtaattcacattatccggatgatccgtattggtatttcctgtgcaacaaatacggtatttatctcgaagatgaggcgaatatagaatcgcacgaatattattatggtgctgcctccctctctcatccggtggaatggaaaaatgcgcacgtggcacgtgtgatggaaatggtgcgtgccaatgtcaacaatccttctatcgttatctggtcgttgggcaatgaagccggaccgggcaagaactttgtggcggcttatgatgctttgaagaagtttgatacttcccgtcctgtgcaatatgagcgtaataatgacattgtagatatgggttccaaccaatatccgtctatcggctgggtacgtggggccgtgcaggggaaatatgatatcaagtatccgttccatatatccgaatatgcccattcaatggggaatgcctgcggtaatctgatagattactgggaagctatggagtcgaccaatttcttctgtggaggtgccatttgggattgggtagaccagtctatgtacaattatgacccgaagacaggtgtccgttatctggcttacggcggagactttggcgatactcccaatgatggtcagtttgtaatgaacggcatcgtgtttggtgaccttgaaccgaagcctcagtactatgaagtgaaaaaggtatatcagcacatcggcgtaaaggcaatagatacagaaaagggggtatttgagatcttcaataagtactactttaagaacttggcggaagattaccagttggtatattcgctttatgaagacggcaaaccgataatgaccggtaaaccgatggatatcaatatagctccacgccaacgtgcacagatcactctgccgtatgatcatgcctctcttaagaaagatgcggaatactttatgaaactacagtttatactgaaagatcaaagaccttgggctgccaaaggctttccgatggcagaggaacagattttgataaaggaggctacggatcgcccgtccatcagtgaagtaactgtcggtgcagcaaaactggatggatttgtgctggacaaggatacgaagcgcatccttataaagggaactgattttgaagccatatttgacccgcaaaccggaagtatctacagtctgaagtatggcaacgagacagttatcgccgatggcaacggtccgaagctcgatgctctccgtgcttttacaaacaatgataactggttctatgctccctggttcgaacatggtttgcacaatctgattcataaagcaactgaatataaagtactgaataaagacaatggcactttggtattaagttttacggtagaatctcaggcaccgaatgccgcacgcattaagggtggtacaagctccggtaagaatagcatcgaagaactgaccgacagaaaattcggtagcaatgactttaaatttgtcactaaccagatatggacagtgtatccggacggttctatcgaattgcagtccagcattacttccaatcgttcgagtttggttctgccacgtttgggttatgtgatgaaagttccccaacaatacagtaacttcacttactatggacgcggaccgatagataactatgccgaccgtaaaagcggacagtttatcgaacagtatacgaatagcgtagcaggtgagttcgtaaacttcccgaaacctcaggatatgggcaatcacgaagatgttcgctggtgtgcattgaccaatcaggcagggaatggagctgtcttcgtagctaccgaccgtctttcggcttcggcacttcagtactcggctctcgacttgattttggcttcccatccttatcagttgccgaaggcaggcgatacctatctgcatttggattgtgcagtgaccggtctgggtggtaacagttgtggtcagggaggtcctctcgtacacgaccgtgtgtttgccaatcagcacagcatgggcttcatcattcgtcctgccggtaaggaactgagtgtcgttgccaatgttgctcctgcgggagatcttcctctgtctatcacacgcacccctgtcggaatggtcgaattgacttcagcaaagaaagatgctgtcatttgttatagcattgacggaagtaagaaagtgcaggaatacacagagcctgtccctatgcgtaacgggggtacgatcaaggcatggtataaggatagtaaggatatcagcagcacgatgaagtttgagaaaatagaaagcattcagacgcaagtcgtatacgccagtagtcaggaatcgggtgaaggcgatgcttctcatctgactgatggtgatccgaataccatctggcataccatgtattcggtgacagttgccaaatacccgcattgggtagatttggatgccggtgaagtcaaggaaatcaaaggctttacttacctgccacgacagaatggaggaaacggtaatatcaaggattactctattcaggtcagcatggatggaaaagaatggggagagcctgttaataaaggaacgttcgcaagggactccaaagaaaagagagtcttgtttgacaaaccggtgaaggcacgttatatccgtttcacggctttaagcgaacagaacggacaggattttgcgtccggtgcggagataacgattctggctaactaaagatagctgaatatatagaagaaaagtatcaatgggaatgtgtccccccttctaaatttatgagggtttcgacacatccccattgatgcttttctctattttatcggtatgaggaaacttctacaactcctttcccgccttctcaaaatccgccttagacttactctgcgtcacaatatacacacccagaaacacaagtgtaatggcgattcctttttcccagccgaagctcccgattcccatgaggattgctgcaatcgtagccacaatcggctgcatatagttatacatacttaccactgtagggcggagtaacttctgagctgtcatgatgcagagataagcaaggaaacttcctcccagtacgacatacaagacctgcaaaatggcaaccattggaatgctggtccattgaatgaccgaaatatcttgataagagaaaggaatataacacatcgaagcatagataaacatccatttattgatggttactgccgaatatcgctgagacagccccttgaacaccgtcagatagatggagaaactgatttgcgcaaccagacaaagcaagtcgccgatcagacttccgttaccactactcgctgcctgactgctcataataaggataagcgctcccatagctcccacgaaaatacccagtactttcttgttcgtaatcggctctttcagatagatggctgccacaatcatggtaactatcggcagagtagtcgttacgatagaagcatcaataggcgaagtcatcgaaagcccgaagataaatatcccctgattgaaaaccagagcaaagagggaagcaaagaaaatcttcagcatatcgcggtggtccacatgctcctgtttgcagaagatggaaagtatccagaatgccgctgccgcacctaccatacgaaacgtggtgacggagatagctgaaaactcttgaagtgccgatttgccgataggagacatcagtccccacataacgtttgccgtgagtgcaaacagatgtccgtgcagattcttgttattgcccataagtctgtgtataccttttaattgttacctttattgaaaactgctgcaaaggtaaccaatttgtcgcatgatttgtttatatttgccttgattaaaattgaatattatggaacaacaggcagactatatccggcggatcgagatcaaaggactctggggccgctttaatatacaatgggatttgcgtccggatgtgaatatcctttccggcatcaacggagtgggaaagaccactattctgaaccgttcggtgggatacctcgaacagctttccggcgacatacagctctccggtgaaatgaaaagcgacgcaaagaacggagtacacctcttctttgataatcccgcagcgacttatatcccatacgatgtgatccgcagctacgaccgccccttgattatgggtgacttcacggcacgcatggcagacaagaacgtgaagtccgaactggactggcaactgtatctgttgcagcgccgctatctcgattatcaggtcaatataggcaataagatgatcgaaatgctttccagcaatgacgaggaacagcgcagcaaagccgccaccctctcccttgccaaacgtcgttttcaggatatgattgacgaacttttcagctacacccgcaaaaagatagaccgccgtcggaatgacatagccttctatcaggacggagaattgctgtttccatacaaactctcgtccggtgaaaagcaaatgctcgtgattctgctgacagtgctcgtgcaggacaacagccactgtgtccttttcatggacgaaccggaagcctccctgcacatcgaatggcaacagaaactgatttcaatgatccgagaactgaatcccaatgtgcaaatcattctgaccacccattcgcctgccgtcatcatggagggctggctggatgcagtgacagaggtgagcgatatttccaccgaagcggacggattcagactcaccccgactattaattgttaatgacaacttctacatggcaacttcactacgcgataatctgacttcttcttacttcaatgctgcccacaagctgtattccaaaaaggctcgccggcgcatcattgcttacgtagagagctatgatgatgttgctttctggcgcacattactcgaagagtttgaagatgacgagcattattttcaagtgatgctcccttcggccacctcattggcaaaggggaagaagatggtactcatgaacacgctgaataccgccgaactgggcaaaagtctgattgcctgtgtcgacagtgactatgatttcctgttgcagggagccacgaacacttcccgaaagatcaaccggaacaagtacatattccaaacctacacatacgctatcgaaaactatcactgctttgccgaaagtcttcacgaagtatgtgtgcaggccacattgaacgaccgttttatactggatttcaacgcttatctgaaacggtattcagaaatcgtatacccacttttcctgtggaacgtgtggttttatcgtcaacgggatacgtatactttcccgatgtacgacttccatacttatactgccttgagggagatcagtctgaaacatccggaacacagtctggaagcactgcaacaccgagttaatcagaaacttgctgaactgaaaaaacgcttccccggttctgtcaaccaagtgaacggattgcggtcggaattaaaggaactgggactcgtccccgaaaccacctatttatatatgcagggacatcacgtgatggataatgtcgtgatgaaacttctgattcccgtctgtaccgccctgcgccgggaacgggaacaggaaatcaaacgactggcggaacataatgaacaattcaggaatgaattgacttgttatcagaacagccaggtgaatgtcgaaatcatgttgaagaagaacgtcgcctataagcgactcttccactacgactggctgaggcaggacattcaggaatatctggccaaaggagaatgaataaaagggaactaactaataagggaataaactaaaagagatactattttatgaaagaagtgattgatacagtgagtgtggcattggcaaatggagatacggagaatgttggcaatgtcgtgatgcaggaggtcaaccgtacgttgctctcggcaggtgtggatgaagtatgggcggacaaaatagataatctgatcgtattgctgtttattatcggaatagccttgttggctaacataatctgccgtaaaatcattttacgggtggtagccaagttggtgaagcagaccaaagctacctgggacgacattgtattcaaccataaagtgatggtgaatgtcagccggatggtagcgcctatcctgatttatatcgccattcctatcgcattccccgagcatgcggattctgatttgctcgattttctgaggcgtctctgtctgatatatatcattgccgtttttcttcgtttcatcagcgctttgtttacggctgtctatcaagtctacagtgagcgggagcagtatcgggacaaaccgttgaaaggacttttgcagacggcgcaagtgattcttttctttataggagccatcattattataagcattctgatcaatcagagcccgatggtcttgctgaccggattgggagcgtctgccgctattctgatgttggttttcaaagatagtatcatgggatttgtatccggtattcagctttctgccaacaatatgctgaaggtgggcgactggatcaccatgccgaaatatggtgcggacggcacagtgatagaagtaacgctgaataccgtgaaggtgcgtaatttcgataatacgattacgaccattcctccttacctgctgatcagcgattcttttcagaactggcagggaatgcaggagtccggcggacgccgggtgaagcgttccattaatatcgatatgacaagcgtgcgcttttgtactcccgaaatgctggaaaaatatcgcaagatacagttgctggcaaattacgtagatgaaacggagaaagtggtagaagaatataataaggagcatgatattgataattccgtgttggtgaacgggcggaggcagaccaatctgggagtttttcgtgcctatctgaccaattatttgcggagcctgcccactgttaatcaggatatgacctgtatggtacgccagcttcagcctacagaaaccggcattccgctggaactttatttcttttctgccaacaaagtatgggttgcttacgaaggcatacaggcagacgtgttcgaccatgtacttgccatcattccggagttcggcctgcgcgtctttcagaatccgtcgggtgaagacctgcgacggataggagtgaagatagaacactgatttaaaagatagaatactatatattttaagaacgatacatactgttaaccattattgattatgaacacacctatacccaatcagattatccgtgaaattacacctttgtccgacaaagactgtttctatattgcagaacgttataagacggagtttacctatccgattcataaccattctgaatttgaactgaactttacggaaaaggccgccggagtcaggcgtgtagtgggagattcctccgaagtgataggagattatgatctggttctgattacgggcaaagacttggaacacgtatgggaacagaatgaatgccgctccaaagagatacgggagatcaccatccaattctcttccgacctgttcttcaagagctttatcaataagaaccagttcgactctatccgccggatgctggataaagctcagaaaggactttgtttcccgatgtccgccatacttaagatatatccgttgctggatacgcttgcttccgagaaacaagggttctatgcggtgatcaagtttatgacgatcctgtatgaactttctctctttgaggaagaggcccggacactgtccagttcttcttttgccaagattgatgttcattccgatagccgccgggtacagaaggtgcaggaatatatcaatctccattatcaggaagaaatccgattgggacagttggcaagcatggtcgggatgactgatgtgtcattcagccgtttctttaagttgcgtacggggaagaacctttccgattatattattgatatccgactgggattcgcttcgcggttgctggtagattctacgatgtctatcgcagaaatctgttatgagtgcggattcaataacctgtctaattttaatcgtatctttaagaagaaaaaggattgttctccgaaggagtttcgcgagaactaccggaagaaaaagaaactgatctaatttctctgtctcctcgcatactttactagtctgtttctctattagggctgactaaaaagtcaatagtatctccattctcctcctttccgaaggaggagaatggagatactatcgactaataattagcttagaatcgtgttgaatttagagtcttgtttcctaagatttattcttcgggggctgacatctattctccgttaggtacaaaactaatcgtctgacagttgttgttttttcgtctgacaactgtcagacgaaaaaacaacaactgtcagacgcaagtttaactatagtcagacgattaattctgtgcatgacgggagataaattcttttgatatgcggattaaatcttacgtagaagaggactaaatctcattggtaagcggattgaaacagtgtggtaagtcattgataacaagtttgtaacacgatgtaacaaacctgaaacggctatttcaaaccattgtatctgattcgtattcatattgtaatctcttgggtctacctttgccgacgtaataaaaacgtagagcgaagttcgatgaaaaaactatttcttttaagattttcagttgcagccttcttttgtttgttgtgtgttcttcccgcattggctgccaatattaagattaaaggtgctgtgaaagataaactttccaaagagcctttgattggagcaacgatacggttggtaggaactcctgccggagccgtgaccgatatggacggtaattttgaattgaacagtaccggtgttttggaaggtttgtatgatatagagattaaatatgtaggatataaaacggaagtacgtcgtaaggtccgtgtagaaaacggaaaactggcgattctgaatctggaattggagacagatgcgcacgaactttcggatgttgtggtggtagcaaagaagaatcgtgaaaatgagaatatgttattgctcgaacagcagaaggcggtcattgccgtgcaggctgtcagcgtcaaagagctttcacgcaaaggtgtttccgatgcggaaggggctgtaaccaaagtggcgggagtctccaaacaggatggagtgaagaatgttttcgtccgtggactgggcgaccgctataatgcgactacctttaacggatttgccgttccttcggaagatccggaatataagaatatctctctcgacttcttcggtacggatattatccagtctgttggcgtcaataaggcatttaatgcaggaggtatcagtgatgtcggcggtgcgacaatcgacattgtttccaaagaactgattggcagcggaaacctgaatatcggcctttccggaggactgaacacgcagactgtgacagccgactttctgaaacaggacggagtaaaccttctgggcttcaccactacaacagaacccgccgatgaaaacaactggggattcaagaataagctggacccctccaagcagagcttgcagataaaccggagttatagcatttccggtggaaagcggtttcatataggaaaagacaggaatccgctctctttctttctcactgccggacataccactgattatcaatttacggatgaaaccatccgcaacacaacgacgagcggtacgatctacaaagatatgacaggcaagaagtacaccgagaatatcagccaactggcactggccaatgtggattatgatatgcagaaccgtcaccacatgagttataacttcatgatgattcatgccaatgtgcaatccgtaggagactataccggtaaaaactccatcttcagtgacgattatgagaatcagggatttacccgtcgccagcaagcgaatgacaacttactaatcgttaaccagctgatgactaactggggactgaccaaaacattgagtctggatgccggtgcttcttataatatcgtgaaaggcaatgaacccgaccgccgaatcaacaacataaccaaagcggaagaaggatataccttactcagaggcaactcccagcaacggtatttctccactttggacgaagatgacatcaacgtaaaggcaggactcatctaccgtctgaaagataacgtagaagaaatctctaatatacgcttgggctatacaggccgatttgtagacgacaatttcaaggcgactgaatacaacctcacagtaggacacgcttcttccatcccctcattggataatttctcactcgacgattattataatcagcagaatctctcttccggatggtttaccgttcagaagaacatcgataagtattcggtcgccaagaatatccattccgcttatgcggaagccacctaccagtttactccccgttggattgtaaatgtaggaatgaagtatgacaatgtggatattcaggtagactacaatgtgaataaaggcggatcggaaggaagcaacacgattcaaaaggatttctttctcccgagtctgaatctgaaatacaatctgagtgaaaaacattccttgcgtctcggagcgagcaaaacatatacgctgccgcaagcaaaggaaatttctccttatcgctacgtaggtgtgaatttcaacagtcaggggaatgcgaacctgaagccttcggacaactataacgtcgatttgaaatgggactttaatcctacccccactgaactgatctctctgacagctttttataagctcatcaagaatccgatctcacgcattgaagtggcaagtgccggaggatacctttcgtatgaaaatatagccgataaggcaacagtggccggagtggaagtagaagtacgtaagaatctgtttgtccgtccgctaagcagtgcggcaaacggaatgaataagctctctttcggcttgaacggatcgtacatttatacaaatgcgaaaatgcctctggcaacggttaccaccggatcgcaactggaaggggccgctccctggatcgccaatttcgacttgtcccacaacttcacgaaaggaaatcatagcttcattaatacattggtattcaactatgtcagcgataagatttataccatcggtacgcaaggctaccaagacatcatagagcagggaatgatgacgcttgacttcgtttcgcaagccaaactcaacaagtatgtctcacttacgctgaaagcccgcaatctgctgaatccctcttataagttgagccgcaaagccaacgaaagcggagagaaggtagtactcagcgattataaaaaaggaataaatatcagtctgggagtgtcgtgcacattttaaaccggataatgaaataagattattaactaattattaaagcaaaatgaaaagattgtttgtaaactttatgacgtttgccgctatggcaactgcactgacattcactgcatgtagtagtgatagtgacggagatgacaatggaaacggtaacggtggaaatggcggaggaacaggtagctctatcgtggtaggcgaaaacatcctgtccggaacactgaccggtgaacagacactggatgccaaagaatacattctgaacggaacggttatcatcgccgacggcggtcgcctgaatatccctgccggaactaccatcaaggcgcgtgaaggtttcagcagttacctgctggtagcgcagggaggtaaactctatgccgatggtacggccgataaaccaatcgtctttacggcaaataccaccagcccggtatccggatattggggtggcgtgatcatcaatggtaaagcacctatttccggttcaaagaccgacaagagcgatacggcactgacggaaatcaacaatgactataaatacggcggcagcgcagctgatgacaactccggttcgttgacttacgtgaaaatctgctatgcaggtgcacgctccacagcagacatcgaacacaacggactgaccttgaacggtgtcggcaacggaacaaagattgaaaatatctacgtactggaaagtgccgacgatgcaatcgagttctttggtggaacagtaaatgtgaccaatctgctggctgttaatccggatgacgatatgttcgacttcacacaaggctattgcggtacgctgaagaactgctatggagtttgggaaagcgactacacaagtacggaagccgatccccgcggcatcgaagccgacggtaacatggacggtctgtatccggatcacctgcgtcagtctgactttaaggtagaaaacatgactatcgtgaataatgctgccaacactgccgataacgtagaccgtatgcaagatgtaatcaagattcgtcgcggagcaaaagctaccatcaccaatgcactggttaaaggtacaggtggagctatcgacctggttgatatgaaagacagtaaaggtgcaggaaacatcgaatccagcattcatatcaccaatacattgagtttcacagggttgaagcagaacggcgaactgaatacatttgtcgaatcggcagacaatacaggtgcagacgcttctctgttcggctggacaggctataatttatcagcattctgatgaagtagccaacggttctttttcacagtaggtattacttttcgggcacggattgcacgaattgcacggttatgatttactaaaaccgtgtaatccgcgtaatccgtgccaaatcatataataatgagatgcgtttattacgcttttacctccctggctatccctgctactatcctctctcttctattatgaattatttcagatattatatgtttcgctgattttctttttcgtatatttgctattcattattatacgatcaatcacttatgcaaacaaactacgagcgatactgtaaaatgtcttctttggctcagataggatggtgggaagcggactttttggctgggcattatgtctgctctgattttctttgtgatcttctgggactagaaggtgataccatctctttcatggatttccagaatttgatacgtgaggattaccgcgaacagatagtacaggaatttcgtgctaacgcaaatattcataaagacttttatgagcaaacttttcccatttgtttaaaaaatggtgaagtttggctgcatacccgtctggctcttcgtgagaaaggtaccggaaccaatggaggtgacaaatcttttggcgtcatccagcgtgttgaggcgcctaaagaagtggaacagaaaaataccctccggcgtgtaaacgacctgttacgccggcaaaactatatatcacagtctttgcttcgcttcctccatgatgacgatgtagattcttgtattatggagatattgaatgacgtgctgagcctctatcaaggcggtcgtgtgtatatctttgagtataacgaagactatacgcatcatagttgcacgtatgaagtcgtttcggaaggtgtttccaaagagaaaaacaagcagcagtccattccggttaatgaaacccgatggtggtgtgagcagattctatctggcaaacccatcatactgacttccttgaaacagttgcccgaagaagcggaggatgaatataaattccttgacgctcaaggcatttgttcattgatggtcgctcctttgatggcaggtgaccgtgtatggggatttatgggtatagatctggtcgaatcgtatcgtgaatggagcaatgaggattttcaatggttctcttcattggcgaatatcatcagtatttgcatcgaattgcgcaaggccaaagatcgtgttgtccgcgaacagtcttttttaagcaatctgttccattttatgccgttaggttatatacggatgtctgtcgtccgtgatgaaaacggtcagcttcttgattataagataacggatgtcaacaaggcctgttcccgcttctttgcccgacctgccgaaacgtatataggagtcttggcctctgaaatatatccggatttttcttcacagctcctctttctgaaagaagtgctggataacaattcatacagggaaaaggatatctttttcccgcagacagagctttatacccattggatagtttattctccggaaaaagatgaagtggtaggtctgtttacagattccacggaggccgtgaagaccaatagggcactggaccgtagtgagaagctttttaagagtatctttgccaatatcccggcaggagtggaaatctatgataaggatggattcctgattgacctgaataataaggatctggaaatattcggcgtagaaaataaacaggacgtgataggagtcaacttctttgagaatccgaacgtaccgcagcatatccgtgaccgtgtgcgggatgaagatttggtagacttccgtctgaattactcttttgaacgggcagaaggttattatcaccccgatcgtcgggatacgatagatatatatacgaaagtcagcaagctctatgataacgaaggaaactttaacggctatatcctgattagcattgataatacggagcagattgatgcgatgaaccgtattcgtgattttgagaatttcttcctgctcatatcggattatgcaaaggtgggatatgccaagttgaatctgctgaaccggaagggatatgccattaaacaatggtataaaaatttaggtgaagaagaggatactccattggcggacgtggtgggagtctatcgtaatatgcatcccgaagaccgtgaacgtatttttgatttctatcgggaggtcagaaaaggaaaccggaagcactttcagggagaaatgcgaatctgccgtcccggcaagaagaatgaatggaactggatacgtatgaatgtagtcgttacgacatacaatccggaagaaaacgaagtggaaatcatcggtatcaactatgatattaccgaactgaaggagacggagaaagaattgatcctggcacgtgacaaagctgaaatgatggaccgtctcaaaagtgctttccttgctaacatgagccacgaaatacgtactcctctgaatgccatcgttggcttttccgacttgctcgtcgatacggaaaatatagaggaacggcgggagtatattcagattgtgaaggagaacaatgacctgcttttacaactgatttcggatatactcgacctgtctaagattgaagcgggtacatttgagtttaccaacggagatgtagacgtgaatatgctctgtgaagatattgtccgctccatgcaaatgaaggtgaaggagaatgtcgaactgatgttcgatccgcatcttgcggaatgccgcattattagtgaccgtaaccgactgcaccaggtaatctccaattttgtgaacaatgcgattaagtttacctcggagggaagtatccgtgtgggatataagcagaaaggggaagaactggagttctatgtacaagacacgggagttggtattgacgtagagagtcaggcacatatttttgaacgttttgtgaagctgaactcctttgtacacggcacgggcctgggactctccatctgccaaagtattgtggaacaaatgggcggaaagataggggtggaatccgaaccgggaaagggttcgcgtttttggtttagccttccctgttttgtggtgatgtcggaagaatagacaagaatgatggggctgactaaaaagtcagccccaaagagtcggtttcttatattccgaatgatagtttatcgatagactgatatacgatacttgcaatacccagtccgatgatgcccagtgtgcagagcgccagtccccacttcgtacagcggtcgctgcggaaagtcggaatcgggttatcggaaggcgtgatatacattgcttttacaatcagcagatagtagtacaatgaaatcacggtattaaccagtgcaatgaataccagcaagtggaagcccgcttcgaaagctgccatgaaaataaagaacttcgagaagaatccggcaaacggaggaatacctgctagtgagaacagcgaaatagtcatcagaaaagccattttcgggttcgtcttgtagagtcctgcataatcttcgagggtaaacttctgactgcgtaatgctacgatagtgatgacggcaaatactccgagattggcagcggcatatacaagtatgtaatataccatggcggtcattccctgtgccgttcctccgattacacccagcatgatatatcctgcctgcgaaatactggagaacgccatcagacgtttcagattctgctggcggatagcgaatatattggcgatggtgatagaagcgatagtcacccagtaaagtacttcttgccagtcatgtatcatcggtgcgaatactttgatcagaattgccatcagcacaaatgctgccgaacctttggagataacactcagataggcggtaaccgtactcggtgcaccttcgtaaacatctgccgtccataaatggaacggaaccagagagagtttgaacgccataccggtaaagaagaatacaaaagccatgatttgcaacggatttccatcgatatgagcaggaagatcatcgaaatacagtgttcctgcggaaccgtaaatcattgacagaccaaacagtaacagtgcgctggagaaaagtgcggtaaggatatacttggcaccggcttcagcggagttatggcggtatttgtcgaaagcgatcaaggctgccatcgggatggaagctgtctccagtccgatgaagaacatcaggaagtgtccggcggaaatcatgagatacataccgaacagggtggagagtgtaagtacatagaactcaccttgcttgaatgaagtatcgtcgcgtttcatccattcgtgtgccatcaggaaaacaatcagcgtgcctatgttcaggattgatttgacaaccgtgtgcatgggtacatagtgatacataccgccaaaaatgtcggcagctgtgcctggaaccagattgatcgctgtatggatggccatcaggataactggcagcatggtgttcaaaacgggtctcgtccctttttgcttgtgtgcgtccggactcatgaagagatcggcaaggaacagcaatagtaaaactgctacgagcgacagctcttcccgcatatgtagaaattgtgaataatccatctttataaattaagaattaaagattaaaaaataaaggttatgggatgagttgtgagactacagggagtacactttcaccaatcatgtggcttacccagaaaggagccatacccagtccggctacacaaacgatgaggcagataacagctacccgttcatcccaggttgcgtctgtcagcgcaagatgatgtttgttggtgcaggtaccgtacagaatcttgcctaccagacgcaggatatagactgccgtgatcacgatggatgaacaagcgataatggtcagtgtacggtggaatacgtcgttgttctggaaagaacctacgaagatagtcatttcggcaatgaacccgcttaatcccggcaaaccgagattggcaagaccggcaatcacataacatacgctgaggaacggcattactttcattaatccggtaagctcgcggacatcacgtgtgtgtgtacgtccataaatcataccgatcagggcaaagaacaaggctgtcatcaatccgtgggaaagcatctgaagaatggctcctgtcgcagcagtctgattcagcatcagaatggcgaaaagtaccagtccgcagtgagaaacggaagagtaagcgttgatgtatttcaagtctgtctgtacgcaagcggagaatgctccgtaaacaacggagatacctgtcagtatcaggaatatccatgaaagttcgttagcggcttccggcatcagatacatggcgatacggaaacatccgtaacctcccagtttcatcagtactccggcgtgaagcatggatacagctgtcggggcggaagcgtgaccatcgggactccatgtgtggaacgggaaaagagcacccagcacaccgaacccgaggaaggtaagcgggaaccagatacattgctgtgcaaaaggaatattatgtagctgtgctatttccagcaggttcatggtggtagctcccgaaccgaaatagattccgagaataccgatcagcaggaaagcggaaccgcccatcagcataagggtcagcttcatggctgcatattctttacgtcccgaaccccatacaccgatcagcaggtacataggaatcagcgcgatttcgtagaacatgaacatggtgaataagtcgatggatataaagaatccgaagactcccatagacaacagtgtgaaccaaaggaaatattcttttgtcagaggctgcagacgccaggaggcgaaagtacctgtgaatacaataacggcagacaataacaacatggctaccgaaataccgtcaacgcctaccgagtaggagatgtgaagcggtgcataccagagtgtatccgcacggaatagcatttctgccgtgttgccggcactgcgtcctcccaaatacataaaggtaagtacgacggaggcaatcagaagtgccgatgcgccggtaaccataaccccccgaatcgctttgattccccgtgctgcccaaagtccggcaagcatcagtaaggggatgagtacgaagattgataaaaaattcataattgaattattaagttttaagtattaattcgcagcgacttgttgcgcagcttaatatctaatacctgatagttaatacttgctatagaactaacagcaggataagcgccagcgctccgcaaaggaacacgtatgcgtattgctgtacctgaccgctttgaagaccacgtatctcgtcgcttgtcgtattcgtagcccatgccaggaaattaaagaatccatccactacatgacggtcgaaccatgcgatgggagtcgaaatgcaacggaagatgatcttatgcgtaataaactggtatatatcatcaatataaaaacgatgataagcagctgtccacaatccattgaaccgtttggcaagtgcattggcaacaggttgtttggcattcttatacatccatgtggcaatcccgatagaaataatcgcaattacaacgcttgtgacagctaccgacagatcgaggtgaatagagtaagactccccattcgaactgataaaatgtccgaaaggaatgaaccctgcaccacaagtaacaaccgccagaaacatcaacggaaaagtcatagccaacggactctcatgcggggtgtgatgagcatgaagctctttattttctttgccccagaagatgccgtagtagaggcggaacatatagaaggcggtcattgcggcgattactgtcatcacccaacccattgcagggctatattggaagcaggcagccaaaatctcatcttttgagaagaaaccggagaacggaggaataccggcaatggcgagacaggcaatcaggaatgtccagtgagtaataggcatgtatttgcgtagtcctcccatggctgacatttcgttggaatgtactgcatggataatgctgccggcacccaagaagagtaatgccttaaacatggcgtgtgtgaagaggtggaacatggaagccatatatcccagtcctccgtggtgcgggttcatagaagtacaaacgcccagtgctaccatcataaaaccaatctgtgaaatggtcgagaaggccagcacacgtttgatatccgattgtacgcaagccacgcttgctgcataaaaggcggtgaaagcacctacccaggcaatcatatgtaaggtgtccggtgcataagcaatgaaaagcgggaacatacgcgctaccagataaacgccggcaactaccatcgtagccgcatggatcaaggcactgacaggagtaggaccttccatggcatcgggcagccagatatgcaacgggaacatggcactctttccggcgccaccgataaacatcagtcccaaagccaatggaagcatggaagcgccgccactgatcaatgataccgtatccggtgtgaagccgaatgtgccaccgtagtatccgtaaatcagaataccgataaggaagcctaagtctgcaaagcgggtgacaatgaacgctttcttggaagcggcaatggcagcaggctttgtatagtaaaaaccgatcagcagataagaactgacacccaccagttcccagaaaagatacatctggaaaatgtttgtggcaacaaccagtcccagcatagacatcgtaaacagggacaggaaagcgtaataacgttgaaagcccgtctcacctttcatgtagccgaaggagtagatatgcaccatcagtgacacggtagaaatgacaatcagcatcatcacggatataggatctagcagaatgcccagatcaaatcgtaaagtctcggtgaaaggaagccacgtaaaattataaggtatcaatgtggcaaatgttccgtcttccaaacgaggggcggagaaatattggaaagccgtaacgtacgatagtactgctactgctcccagtatcagcgtaccgatagcacccgctgtccgatgagacatccattttcctccgattcccagaatgaggaaggagaggaagggaagaaggagtattagaattgttagttccatacagtttattttaattacttgttttattattgttcatatttatcacgatatccatccgaatggaaattgggtcgtgccgctttggcactaccacttcagatcgtccagattgcggacttgaatgcttcggaggttgcggtaaatgttaatcatgatggcgatagctatagccgtttccgcagccgaaatagcgatggaaaagagtgcaaagaaatagccttccatgcctcccggaaagagaaaacggttgaacacggcgaagttgatgtccgtggcgttcagcattaactctacagaaatcaggatagccagcgtattacggcgggtaaagaacccatagattcctgcaaacatcatgatggtagaaactaccagataatattccatgtgtatcatatctgaaattattaggttttaagtaataagtattaattccttgcggttcattgcgcagcctaatacctgatacttaatagttaatacttacttatttatctctttcgggcgatcatgataccaccgatgatacaagccagcaataaaatactgattgcttcgaaaggcaatatataaccatatttgtcactgcttaataaagcattaccaatggtgtggatgtttatttccagcggaaccaggttggtcgtttgcaggaagttatgcttcagggtgataaacaagataatcgctaaaccggcaatcatcgtaaagagtcctgccagaaacctgcttcgtttcagtttctcggcgcggtcaccttctccactggtcagcaggatggagaatacataaaggacgacgataccaccggcataaaccataatctggacagaccccagaaaggtgtaacccagcaggaaatagatgccagccgtgccgaagagcacgaagagcagataggtggctgagcggacaatacgttgggtagtcaccgtcatgatggacattgcaataataaatgctgccaaaaagtagaatactactgtttcaagtgttgatcccatatctaaacttcttttttcttttcaattactttactaccggtatgattcagttgcaggacaagcttcgtccggtcaaagacggcatgttcgaagttctggtcgaacgtgatggcatcatgcggacaagcgttgacacacagttggcagaacatacaagctccgaggtcatattcatattttgccaggattttcttcttcttgccgtcttcagtctcgatcgtttcgctggttacggtgattgtatcgttcggacaagctatctgacacaatccgcaggctacacagcggtgttcgttattctcattgtggggcattgccagtgtaccacggaaccggtcgaacattttcagctctttccggttttcaggatactgttcggttacttttttgcggaagtataccttgatactggttttcatacccgttgccagagtgctgataccatgtatcagtcctcccaaatacgtatatttttgatctttatattccataattcttattttagaagtggaagccaaaggcaacacaacatgccattaataataggtttaccatagaaattggaaccagatatttccattccagattcagaatctggtcgatacgcaggcgtgggaaagtccatttgatccacattaagaggaacacaacggagaatgctttggcaaagaaccagatgaagccgggaatatagtccataacagcgttgaatccgtccaaaccgatgatatgcaatggcatccagcctcccaaaaagatggtagcggccacgctggctacgataaacagattcagatattccgccagataaaagaaaccgaagtgcataccggaatattccgtatgatatccggccgtcaattcactttccgcttcgggaaggtcgaacgggccacggttacattctgcatttccggcaatgagatagatgatgaaagcgataacggcaggaatatgtcctttgaagataaaccatccgtcagcctgtccttctacgatttcggagaactgcatggtgcccatcagtacgaccatcgtcatgatgctcatacccactgacaactcataactgatgatctgtgcgccgcttcgcatggcaccgatcagcgaaaacttgttgttactaccccaaccggcaagcagaatacctaccacaccgatgctggaagcagccagcaggaagaatacgcccacattaaaattcagaatttccgctcctttattaaaaggaatacaagcgaaagtgaggaacgaggcgataatcaccatgaatggagccagattgtagaggaagcggtcggcatccttcggagtgaaaatctccttggtcagcatcttgagtacgtcgcatatcacttgaatagaaccccatttaccgacacggttcggaccgaggcggcactggaagaaaccacagactttgcgttccatgtaaatcagtacgatagccagaattgcatatagtgcaacgatgcacacgccgacagctatgcactctataaagatggcccatccctccggcataacggagagcagcagctcatgtatccagtttgttactatactaaagtcgaacatatatattttaattattaggttttaagtattaagtattaattccatgcggaatatagcgtatatcatattgcatagtcggttaatacttactactttatacttaatacttgttttttatcttttgtttatcggtcgatgtccggaactacatagtccagtgttcctccgatggcaatcaagtcggcaattttcgctccgcggcaaatcgtgtcgattgcagcaacaagtggtaatcccgtagcacgatagtgcaggcgataaggcatcttgtcaccctgactttcgagaaagactccgaattctccgcggcttccttctacggcggcataataactgccttcgggaacgcggatgatcggtttcatcttttcctgatacgggccttcgggaatgttgtctatcaactgctctataatcttcagactctccatgatttcgtccatacgcaccagataacgggcgaaacagtctccttccgtataaacaatttcctggaagtccaccttgtcatatacaccgtacggtatccgcttacgtacatcgcaagcccaacccgaagcacggcctgtacccccggtgcaaccgaatgagattgcatcttcacggcttaacactccgacgcccttcatacggctctgagcgataatgttgccggtaaatatgtcgtggtattcgtgaatgatacctctcatataagggataaattcttttacccgcttgacgaagttaggatgaaggtcggcctgtacaccgccgatggtattgtagttcatgatcagacgtccgccgcaagtctcttcaaaaatatcgagaattttttcacggtcacggaatccgtagaagaaagcagtcagtgctccaaggtccatggcgagggcggagtagaacagtaagtgagagtcgatacgttgcagctcatccataattgtacgaatgtatttgacacggtcactcacttcgatgcccatcgctttctcgatgcacatacacaaagcgtgacggttctgatgtgcgcccagatagtcgaggcggtcagtcaatgccaatgtctgcggatatgtaagactctcgttcattttctcgataccccgatggatataaccgcagttagcatcgatcttacgaataatttcaccttcaagagaaacgcggaagcgcattacaccgtgagttgcagggtgttgcgggccaatgttgactacatactcttcttctccaaagagtttcatttctctgtttttaatcgttccgtccggattaagttctatttcctgtgttgtatcgaacgtctcttcgttagtcatacaaagcggattatctttctccggatcattatctttacgcatggggtatcctacccagtcattacgtaagtaaaggcggcgcatatcgggatgccctacgaaaacaatgccatagtagtcgaacacttcacgttcgtagaagtcggctattttccatatatcgctgactgacggaatttccggtcgttcacggtcggtaacggctgttttcagtgctatccgttctcccgtaacagtcgattccagatggtagacaacgcctaaaccacggagtttctccggtgcgtctttttcgtctgctactccccagtccataccagtgaggctttcaaggaagtccatctgtttttcatttcgcaagcgcagcatttcgtcgtgtaacgctgcagggactataaattgtatttcttgcataattcttcgttcctcattcttcatttcataaattccggtttcttctcttttctgttcgttccaccaaagaatttctctattttcactttgcgttgtagttgcatcatgccgtaatagaaagcttccgggcggggcggacatccggggatatatacatcgaccggaagaatcttatctactccattcagcacatgataagacttcttgaaaggccctccgctgacagcacatccgcctacggcaactacatatttcggatcgggcatctgatcgtacaaacgtttcagtaccggtgccatcttgttggtgattgttccgcagaccatgatcatatcagcttggcgcggactggcacgtgctacttcgaacccgaagcgggccatatcataacgcgcggcacccagtgccatgaattcgatgccgcaacagctggttgcgaaagtaagcggccacagtgaattgctgcgtccccagttgacaaggtcgtccagaaccccaagaaaaacgttcgctcctccggtattaagttccttgaccaacttttccaatgactcattgtcgatgaactcatcatacggaattgattttattttcggttttttggttatttccattccaaagctcctttcctccaggcataagcaaggcccagaaccaaaataataaagaagaagagaatactaacgagcccctgaggtcccatgtcatgcataactactgcccaagggaacagaaaagctgtttccacgtcgaacatcaggaacaggatggcaaacaggtagtaacctacacggaactgcatccatgatttaccacgcgttggtataccacattcataagcttcaaacttttgcacattgtacgaacgtggtgaaatagctcgtgaaagggctattactacaccgacaaaagcgagcgctgtcagtaaaacaacaactaaaaatgtaaaattcataatttcaatagctgtttagattgaatattatatagaaataaacaattagtttctccacacccggatgaaaccaactgtaatgaattgacgaataagataatggattgtaccgtctaaatgacgatcttccttaaaccatatatataatatgtaataggatcgtaaaagtacttgggaatatggagtgaatgagtctgagacgtgttttgctggcttttgtattcacggaaataagtaatcagcaattgcacgcttttatctgtagggatgtgtgcaacatccgcatgactcatatcacaagactgggtagaatagaaataatgaagacgttcaagagcattatgaacaggatgatcctgagatacgtagcacttctcctggcgatatgtcgggggggatactctgcagttatcttccattgcttcattggaaacaacatggatcagcaaagcaagtaccagaaatagtccgtattttaagctttgtttcatctttctcttttaacggctgcaaatataggattaatattcatgttttttgcaaagtcggggttacaaaaaagtattttttaacttgctttatttcaagtccgtttttatttcagtgctactctggagaatcttcttcttttatggtatacatccgttcttgtttggttaaaagatgtaataaaaagaacgatttacgttctttttgacgaattacccaaagaaaattcatttttttgcaaattgtatataacacattgatatgaaacacacactttgctttataacaatcctattgggttctttgttggatctttatgcaaataacgagaatgattctctattgaaagttttagataaagtgatttctgagcgtcttgtgtatacagaaaagaaggaagctactatcaaagagctgaaagcaaaaaagaaggaacaaaagaccttggacgatatgtatcgtctgaattccgagattctccatcaatacgaaacgtttgtctgcgattctgcggaacagtacattaatgagaatattgagatcgctaagaaactggataataaaacctatttgctggaaggaaggctgcaactggcttttgtttattccttatcggggttgtttattcaagctaatgatattttcaaatcaatcaattgttcggatttacctagtcatttacaggctttgtattgttggaatcgtattcggtattatgaaaatttgattaaatatacagatgatgctcgatttgccagtgaatatttggttgaaaaagaagcgtatcgagatacagttatgagtatcttgtatgatgcatcggaagaatattcgaaagaaagagctataaagcttcaggatcagggaaatacaaaagaagcacttaagatactgactaaaatttatcaaaaggaaaaaccaggaactcatgggtttgcaatgatgtctatggggctatcaagagcatatcggctggtcggagagcatgaattggaagaaaagtatcttatattagctgctatgaccgatataaaactggcagtgaaagaaaatgaggctttgttgactttagccgtgaatttataccataaaggagatatcgatagatcttataattatattaaagtagcactgagtgatgctatcttctataattcccgttttaagaatacggtaatagctcgtattcatcctattatagaaaatacttatttatataggctggaaaagcaaaagcagaatcttcgtttttatattttgctcactagtttgtttgttgtggctcttgctatcactttgtattttacttataaacagactaagattgtttcccgtgcaaagaagaatctcaatgttatgaatgaagagttagttgcattgaacaagaatttggatgaggctaatttaataaaagaaagatatgtaggctatttcatgaaccagtgtgccgtttacattaataaactggatgaatataggaaaaatgtaaatcgaaaaataaaaaccggacaagttgatgatttatacaaatcttcttctcgtcctttcgaaaaagaattggaaggattatataccaattttgataaggcgttcttaaaattgtatcctaattttgtcgaagagtttaattcattgttgaaaccggaagattattataaactggataaagaccagttgaatacagaattgcgtatttttgctttgatgcgaatggggattacagatgtttcgcaaattgctgtttttttgcattactcagtacaaacgatctataattataagagtaaagtgaagagaatgtctttattggatggaaatatcttcgaagaagaggtgaaaaagcttggttctttgtcccaaaaatgattctatttggtttaccaaaaccttaaaatggttgtttgttaatgcgttgaatattaatgtattatctagaagagatgttcaaaaacgtctactttatagcctacttccaataaggagtaggcttttttcatctctatatttgcatcacaagatttttgataactgaatactaatctaaagaaacacagctatggatttttcagaattgtatcttacttattattcaaaactggttcggtttgcaaaagaatttgtaatactggaagaggatgcagaaaacataacacaagatgtgtttaccgacttatgggcgaaacgtgattctatggatcgcattgaaaatatgaacgcgtatcttttcagattaataaagaatagatgcttggatcatttgaaacataaaatgtttgaacagaaatatattgaatcagttcaaacctctttcgaaatagaaatgtccttgaaattacaatctttaaataggtttgatgtgtctgatatctcggaaggaaatgaaacggaaatgctcgttcgtaacgcaatcaatagtctgcctcgaaaatgtcgtgacatatttttattaagtcgtgtcgaagggttaaaatatagagaaatctcagaacgtttgggtatttcagtaaatactgtagaatgtcagatggggatagcactcaaaaagttaagggtaaaactaaatatttgccttgcagcatgagttttaataattttattgatatttttttaggggtatttactgggataatcgttcttttgtaaaaaggaacgaataatgggaactaatttaaataaatattttgcaggtgaattgacttcagaagaaaaggaagtcttccttctgaatgtgaagaataatggggaaatgcgcgaagaatttattgagtatcagagtgttgttgctcttgtggattggtcgttccctaaagatgataaagaacttgctaagcaaaaactatctgaatttatgagtcggatagagaatagcgaaaataaaaaggcttaaaaataccatgaatagacttaataacatcatattactagtcgtctttatatgtacgcatgctcattcgcaacaagcttattttgttgatggatatcatggagggatatacgggcattatccggtgaagtggaaaactcagtttattgtcgaccagttatccaagcatccggattggcgaatttgtctggaaatagagcctgaaacatgggatacggtgcaaatacagactcccggagcctatcgacaattaaaaaacgtagtagtaactaagcaggtagagtttacaaatcctacttatgctcagccttattgttataatatatcgggcgaaagcattatacgtcagtttcaatatggtattgctaagataaataaacattttccgggagtgacttttaccacttattctgtggaagaaccctgtttcacaagttgtttgcctcagatattgaagttatttggttttaagtatgccgtactcaaatgcccgaatacttgttggggaggatacactaacgcttatggcggcgaattggtcaattgggtaggcccggatggaactcccattcttactgttcctcgctatgcttgcgagaaattggaagagaattctacttggcagacaactgcttggtgtaatgaagaatcttatctgaatgcttgtcgtgatgcagggattgaacatcctgtgggaatgtgtttccaagatgccggatggaaaaatggtccatggttaggaagtggaaagaatacaaaaagtaattcagtttatgtgacgtggaaagattattttgaaaatatttccattggtaaaacgaatgatgactggcatttctcgcaggaagatatgcgtgtaaacttaatgtggggaagccaagtgttgcagagaattgctcaagaagtacgtacttctgagaataaaataataatagcagagaagatgtctgttattgctcatcttgccaatgggtacacttgtgttcaggaagatttggatgaagcatggcgtactttgatgcttgcgcaacatcatgattcttggatcgtaccttacaatggcctaaataaatttggaacctgggcggatcaaataaagcgatggacagatgagacaaatactgtggctgataaaattacagctgcttctatattcagttttgataacgatactattaatactgaaaaagcccagggatttgtacgtgtttataatacattgggaacaaaaagaaaagaactggtaactgttgaactccctcaggaatatgcagactttgatttggaagtcaatgattatagaaataaaaaagttgattattcaataggaaaagaaggtggaaaaataagattgttgtttgaagcagatgttcctccctttggttactccacatatcgtattaaacaagtaaagacaggtaaaagaacggtttcaggaagcgaaaagattataaatgaaggagaatatgtggttgaaaatgatatgtataaaattgtttttgacttgtcgaagggaggaattattaaaagccttgtagcaaaaaaagaagaaaacaaagaatttgccaaacaatcgggtgaatattctataggtgaattgagaggctatttttatgacgaaggcaagtttcgctcttctacagaagctccggctaagctgacggttttgcgaagtaatatacaagagacaaaggtaaaactggaagggaaaatagcttcacatccttttgtacagattataagcattgctcaaggggagaagcgtatcgattttgaccttactattaattggaagaaaaatgtaggtattggagaatataaagaaaatagttggcgggataatcgcagagcttattgtgatgacagatttaagttaagtgtacttttccctgtaaatcttcattctcctcgtatttataaaaatgcgccgtttgatgtttgtgaaagtaagttagatgatacttttttcaatagttgggatcagattaagcataacattattcttcattgggttgatttggcagaacaggaaggagattatgcattggctttattcgcagaccatactacttcctattcacacggaaaagattatccgttaggactgactgcccaatattctggtaatgggctttggggacctgactataagatcacgggaccgttgaaaatgaaatatgctattgttcctcatcgtggcaaatgggacaaggctgctatagccacgaagagcgattgttggaatgaaccattgttatgttcctatcattcatttgcaaaattggagtcaaggtcactggtagacttaaaaaataccggttatcaggtgagtgcagccaatataaaagatggaaaaataatcttgcgattgtttaatgcggaaggtgacaggaagcagcataatattacttttgatatgccgctgtctagtatagaagaagtagatctgaatggtagagttatagatagaaagacaataaaaacacgtaccggaaaatctgaaattagtatttctatgcctcgtttcggtctaaagacatttgctttgaacttgaattgaacatattctaataatagtaaactgtaatatttttatgtataaagctagcgctaatattttaatagcttgctcttttttgtggctgactgcttgttcttcagcaggagtagtaacagaagatttaattccgactgattatgtaaatccttttataggagctagtaccagtgtaggagctgccggtgtttatcatggattaggtaagacatttcctggcgctactactccttacggtatggtacaagtaagtcccaatactataaccggaggtgataatagttccggttatagtgatgaacacaaaaccattgaaggctttgcctttactcagatgagtggggtgggctggtttggggatttaggaaatttcctggtgatgcctacaacgggcgaactgcaaaaaatagcgggtaaagaagatggtagtataaaagggtatcgttcttcttatgataaagctaccgaaacagctaaagcgggatattattcggtagaactgactgattataagattaaagtagagagcagtgcgacacctcattgtggaatattgcaatttacttttccttcgaatgaacaatctcgtgttcagatagacctggcacgtagagtgggggggacttctacttcgcaatatgtgaaagtattggatgattataccattcaaggctggatgaagtgtacacctgatggtggtggatggggaaatggtgagggaaattccgattacacagtttattattatgcacaatttagtaaaccattgagtaattatggcttttggagtgcggatattcccgatgaatgggttcggaagcgtgatgaagtggtaagtattccctatctgacacgtatatcacaagctccggtcattaaagataagaaagaactggaaggaaagcaccttggcttcttcacagaatttcccacaaaagagggagaacaggttgagatgaaagtaggcatttcctttgtcgatatggaaggagcagctaataactttaaacaggagattgcttctaaaaactttgctcaagtaaaacaggaagcgagtgatttgtggaataaagaacttagccgtatacggatatccggtggaactgatgacgaaaaaactgttttttatacatcattatatcatacgatgattgaccctcgaatctatacagatgttgatgggcgatatattggcggagataaaaaggtacatgaacaggacggtacatttaccaagcgtactatatttagtggttgggatgttttccgtagccagttccctttacaggcgatgattaatccgcgtttggtgagtgatgcgttgaattcgctgataacgatggcagatcagagcagacgggaatattatgaacgttgggaacttctgaattcttattctggctgtatgataggtaatcctgcactgtcggtgctggcagatgcttatatgaaaggaattcgcacgtatgatgtagaaaaagcatatcaatatgcagtcaacacgtcagctaagtttgggaatgattcgttgggatatactcctgaaccgttgagtatttcatatactctggaatatgcctatgcagactggtgcgtggctcaattggcaaaggcgttggggaaagaagaagatgcaaagcgcttttatgaaaaagggcaagcctatcgtaatatgttcgatgcggaaaaaggctggttccgtccccggaatgcagatggatcatggaaagcatggccggagaatgcactgaccgaagaatggtatggttgcattgagtcaaatgcttatcagcaaggctggtttgtgccgcacgatgttccgggaatggttgaactgatgggaggcaaggaagaggttatagctaatctgactaatttatttgaccacactccctctgatatgttatggaatgattattataatcatgctaatgaaccggtacattttgttcctttcctttttaatcagttggatgtaccttggtatacgcagaagtggacacgatatatttgtaaaaatgcttatgcgaacaaagtagaagggattgttggcaatgaagatgtaggacagatgtcggcctggtatatattggctgcttccggaattcatccttcctgtcccggtaacacccgcatggaaataaccagtcctgtttttgacaaggtagaatttaatctggactcaaaatatcatcaagggaaagtatttacaattattgctcacaacaacaacacaaataatctatatatacaaaaagctttgctgaatggcaaggagtacaataaatgttaccttgactttgctgaaatcgcagcaggaggaacattggaattatttatgggcgataagcccaatacagaatggggtgttttatctaacatttaaataactgaatattatgatgaataagtttagacttcttttactagcatcaagtttgtttgtactgaatggaatagggcatgctcagacttctaccatgtcactgaacagttccaatcctaagatagtatgggaagtcaaaccgcaggcagatttgaataatatagggggagaacaaatctctaccccgggttttaaaatgccggactatgtaaggggcgtagttcccggagctgtttttacagcatatgttgaagccggaatcgttcccgatcctaattacgctgataatatatataaagtagatgagacgttttataaccgtcctttctggtatcgtacggagtttgaacttccggcatcttattcagcaggtaagcgtgtctggcttcattttgataataccaaccgtttcgcagatttctattttaatggagaaaaaatatcgggaacgaagacatccactaaagatgtgagcggacatatgttgcgttctaaatttgatgtgacacatctgattaagagatcaggaaagaatgcggttgcggttctgattactgatcctgatcagaaaaagactcgtaaaggaaaagatccgtatggtgttgcttgtagtcccagctatctggcaggtgccggttgggattggatgccgtatgtgccgggacgtcttgccggaattacaggaaatgcttatctggctattacaggtgatgctgtgatggaagatccgtggattcgctcggaattgccgactttgcaacaagcagaactatctttctctacaggaatcaagaacgtttcttctgctccgaaagaagtggaagtttccggtgttattcagccgggaaatattactttctccaagaacattcgggtggaaggaaaagaaacagtacagttgtcggtggataagagcgattttgctgcattagtcattcgtaacccgaaactttggtggcctaacggctatggagaaccgaatctttatacctgtaaactgacttgttcggtagatggaaaaatatcggatgaaaaggatattacttttggtatcaagaagtatgagtataagatgatcaacaacgtagtgaattacccggtccttacattctttatcaatgggcagaagatttatctgaaaggtggaaactggggtatgagcgagtatttgcttcgttgtcatggcaaagagtacgaaacgaaaatcaagttgcataaagatatgaactacaacatgatccgtttgtggacaggttgtgtgactgatgatgaattctatgattattgcgataagtatggaatcatggtgtggaatgatttttggctgtatgtcgcttataatgatgtagctgagccggaagcattcaaagcaaatgctcttgataaagtgagacgtttaaggaatcatccttctatagctatctggtgtggtgctaatgaaacacatccggcacccgatttggataattatttgcgtgaaatgatagctcaggaagataaaaacgatcgaatgtataagtcttgttccaatcaagatggtttatccggaagcggatggtggggaaatcagccccctaagcaccattttgagacttcgggcagtaatctggcattcaataaacctgcttatccgtatggtatagatcatggttatggtatgcgtactgaaataggaacggctactttcccgacatttgaaagtgtgaaattgtttattcctcaggagtcatggtggcctctgcctactgatgaacaattgaaagatgatgatgataacgtttggaataagcacttcttcggcaaagaagcgtccaatgccaatcctatcaattataagaaatcagtgaatacgcaattcggagaatcttcgagtctggaagagttctgtgagaaagctcagttgctgaatattgaagtaatgaaagggatgtatgaagcatggaatgataagatgtggaatgatgcggcagggcttttgatctggatgagtcacccggcatatccatcattcgtgtggcagacgtacgattattattatgatcctaccggagcttattggggagcaaagaaggcttgcgaacatcttcatcttcagtggaactcatctaataacagtataaaagctgtaaatactactaccaaagacttgaaaggcgcttatgccaaagcgaccatctacaacctgaacggaaaagaggttgcggcatatggacgtacaaaacagatggatgtaccggcaagtaacattgcagaagcgttcacgttaaacttcaatccgtacaatttggcttttggcaagaatgtgatagcttcttcatcatcaccatccagatcggcttctttagtagctgacggaggggcaggcagtcgttgggaaagtgatgcgagtgactctcaatggatttatgttgacttgggtaagaaagaaaaaatagagcatgttgtgttgaaatgggaaacggcacgtgccaaagagtacgagatccaagtgtcgaatgatgcgaagaaatggaaaacagtctatacaaacaaagatggacaaggcagtacagatgagataaaactttctccggttactgcacgctatgtgaaaatggcaggagttagccgtgccacagactttggatattcactgtatgaatttgaaatatatggtaagaaacaaaagaatgttgaggaactgactccgctccatttcatccggttagaactgactgacgcaaatggtaatttgatttcagataatttctattggagaaacggcgtgacagatcttgactatacagctttgaatacattgccggaagcagaactgtcgtgcaaattagttgataagtcaatgttatccgaagggaagatgaaattgtcggtaaagaatcattcgaaaactgttgcttgtgctaaccggataagattggtgaatacggctacacaagaaagaatccttcctgttatcatgtctgataattatataactttgatgccgggtgaagagcggactatttctgttgaggcggaaccggaaatgttgaaaggaggagtcagtgttttgctaaaacaatatggtaaggctgaacaaaagaagttggatatatgatatacgtagaaaactaaggggcacctttttaatttgaacaccagaagacattacctgtcctgtcttctggtgtttttaatttccctctatattgtgcctgatatattcaggaagagtagaaagtgaactttctttcttgaataacctgcttgatttaatagacaatgatcagtttattaatctattatgtgtacttgcttaatatcttttggaactaacaacagttcgtttcacatacgtggtcctatcgcttcacatacgtgatcccattagctcacgtacgtagaccgaacgctccacgtacgtgaaactaagaaatgttactgacaaagtttattagtcttgccttcttcatatattaatgttaccgacatttgttttatttgtaccatgataaatagtcctatgtatgaacagaatgaagaaaataaggctttagagttgaataaataagtgagcatacttgatttgtagtgggataggggtgacaatagaaacttataaaattctattatcacccttattatcaccagttattatcaccattacttgcttgattgatagctgtttatctttaaaaagtgacaagtgacaataaaaaactgtttttttcttagtgggagttacttgaaaaataaaacatttattttagtggttaagtaaacttgaatcgtcttttttaataagattcttttttattcaaagttggaaaagagaatattttgaaagataaataattaaatttgtaataaagtgtataatcaaatgaatagtaaaataaacgtaaaggtctttttcctgctatttctaatctgtgtttgttctaatagcctgtacgcacaatcaattccaccctttaaaaaaggagaacgggtagtctttgttggaaatagtataactcatggtggacattatcattcgtttgtgtggttatattatatgactcgttttccaaacaaaccgattacaataatgaatgccggaattggcggtgagagtgcgtgggatattaaagatcggttggactacgatgtttttgacagaaaaccgacttatgtaactctgacttttggtatgaatgacacagggtatgatattttctggaaggagaatgctaaggagttgtcggagcaacggattgaaaaatctttggaaagctttcgggaaatagagaagcgcttgctggcagagaataaaatgaccaaagtgctgataggtggatcaccttatgatgaaactacgaaattgaacagtttactttttcttcataaaaatgatgctattttaaagataattgatgcccagcgtaaggcggcgaagaaaaatggatggggatttgtggattttaatcagccgatggtacaaataagtctggaagagcaaaagaaagattcgacattcactttttgtagagtagatagaatccatcctgataatgatggacagatggtgatggcttatttatttttaaaggcgcagggactggctggagtcgaagtttcggatatttcaattgatgcaaataacaagaatctattaagtcataggaattgtaaggtctccaaactaaagaaagaagctggtggtttaagttttgattatttggcaaattcacttccttatcctttggattctattccaagacatggttggggaaataaaaggtcacaacgtgatgctatggatttgataccatttatgaaggaatttaatcaagaacgtttgcaggtgactaatttagaaaaaggacattatcggctgacaatagatggattgtttatcgataatgtttcatctggacagttggaagatggtatcaatttggccgattatcccaatacaccccaataccagcaagccatgaaaatcatgtatctgaatgaagaacgttttgaagtagaaaaacgtttcagagaatatttgtggacagaatattcgttcttgaaaaaggaaggtctgctgtttgctgataatgagaaggctataaataaacttagggagtatttacctaaagatggttttctgaggatgagttatgagtggtataccaaagcgatgtatcctgagatacgcgaagtatggagtagatatatgaagatcatcgtcgatacaatttataaaatgaataagccgacaactcataaagtcaagttgacaaagataggttgagtaatgcattatccattgtaagagtgttggggggatgatccatagctgtaatattcgcagaaacttatttatgaggaataaaaaactgttactaggtataggaataatgtgttgtctttggtgtttgccaaagattgtacatgggaaagaaaacaaggtctctttttctttagtggagttaaaatgtgagaatatggttgatcctttagggattgacaacgttactccccatttgagttggaagttgaaaggagatggggtggtggatggacaagcattttacgaaattcaggtagcgtcagatagtcttctattaattggggggaaggctgacttatggaaatcggggaagttgaagtctgatgtttctgtgatggtgccttatcaaggcttacctttggcttcgcgttctttatgctactggagggtacgtgcctgggatcggaaaaggcatgtttcccaatggagtccggtggcgcgtttttctgttggtcttttgaataaggaacagatacacggtgtctatatcggttcatcaccggaaggaggcaaggtttgtgctcctttacttcgtaaaaaagtgcaaataggtgaactggcaacgacttttctgtatgtgaattcgctgggatatcatgaagtatatgtcaatggaaagaaggttacggagaatgttcttacccctgcagtctctcaactgaataaacgttcgttaatggtcatttatgacgtatcttcttatttgaaagaaggagagaatgacctgctgatatggcttggacaagggtggtataagaaaactacttttggtgctgcttatgacggtccgttggtaaaagcggaactgaatatgctgagaaatggaaaatgggaagtattgactgcaactgacacttcttggaggggacgagaaagtggctattcggatacaggtaattggtgtgctttacaatttggtggtgaaagggtggatgggagaatagtgccgacagatttttcaacttattctctagataaaatgaaatggtatcctgtggtggaagtaaatgtaccaagacacattgtttcacctcaaatgtgtgaagctaacaagatacatcaaacgttgcaacctgtttctatcaggaaacttagtgaagatacctggttggtagatatgggaagaatacagaccggatggtttgaaatgaagatgccgatgttatctgcgggacatgaggtcacgatggaatatagcgataacctgactaaagaaggagaatttgacaaacaaggtgaaagtgatgtctatattgcaggtggacggaggggagaatattttaggaataaattcaatcatcatgcttatcgttatgtccgtatctccaaccttccggcaagaccgaaaactgaatggataaaatctctccagatttatggcgattatcggcagactgcgactttcgaatgttcggatgctgacttgaacgccattcataatatgattcaatatactatgaagtgtctgacatttagcggatatatggtcgactgtccgcatttggagcgggcaggctatggtggcgatggaaattcgtctacaatgagtttgcaaacaatgtatgacgtagcaccgactttcacaaactggatacaaacatggggagattcaatgcgcgaagggggaagtctggcccatgtaggtcctaatcccggtgcaggtggcggtggtccgtattggtgtggatttattgtacaggcgccatggcgaacgtatgtgaattacaatgatccgagattaataaagaactattatccgaaaatgaaagaatggttctcatatgtggataaatatacggtggatggattgctgaaacgctggcctgatactcaatatcgggattggtttcttggtgactggcttgcaccgataggagtagatgcaggagcacaatcttctgttgatctggtaaataattgttttatcagtgaatgtttggggacaatggaaaaaatagctctgatgcttggggaaaaagaggaggcagagaagtttgctatgcgcaggaagaatctaaatgagttgattcatcaaaagttttatcatccgggtaaaggtatctattctacaggttcacagttggatatgtgttatccaatgcttgtaggagctgtaccggattctttgtacgatgatgtgaaaagaaagatgatgactgatactgaaaagcagcacaaaggtcatattgctgtagggttggtaggtgtcccaattttgacagagtgggctattcgtaacagggaagttgactttttatatcaaatgttgaagaaacgtgattatccaggttatctgtatatgatagataatggtgctacagcgacttgggagtattggagtggtgaacggagtagggtgcataactgctataatggaatcggaacctggttttatcaagcaatagggggacttagaatagatgaatcggtacccggttatcaacatgtatttattgatcctcaaataccgaaaggtttgacttgggctaagatggcaaaagatactccatatggtgtgattgttgttgactgggaattgacagataatattatggatcttcaagtggatattccagttggggttactgctacactctgtattcccaatgaggctgtgtcctgtatgatggatgggaagaatattcgcatagaaaagaaaatgattcaattaaaagcaggtaattttaaatattatatttacatgaaataatagatacgtatgaaaaaacatttattatcagcgcttttagcgatgtgtctggttactacggcttttgcccagcaagggaaagtgtatgagacacgtaccgtaaaaagtaagattctgggaatggaacgtagttactccatttatttgccagcaggctatgacgaaggagatggtagttatccggtattgtatttgcttcatggactaggagataatcatacgggatgggtgcaatttgggcaggttcagtatattgcagataaagcgattgctgagggtaaatcagctccgatgattattgttatgccagatgctgacacggttcataaaggttattttaacttgttggatggaacatataattatgaggacttcttttttcaagaattgattccgcatatcgagaaaacgtatagagtgcgtgctgaaagtcgttatcgtgctatctccggtttgtctatgggaggtggtggagcgttgttttatgctcttcattatccggagatgtttgttgctgctgctccgttaagtgctgttggaggggcatggacattcgatcagatgaagagtcaatcagatttatcgaaggtgtcagaagaaaaaaaagcggaagttctcgggcaaatggatatacaaactatcttggagaaatctccgaaagaaaagctagaccgtatcaaatggattcgttggtatatcagttgtggtgatgatgatttcttatcggtaacgaactgtcttttacataacacgttgttacagcatcaggttggtcatgaatttcgtatgaaagacggcagtcattcgtggacttattggcggatggaattaccagaggttatgcgatttgtttctagaatatttactcaatattgagcgtaagtaaagtgattcttaacaaaataggctttgaagatcaagtccttttatcgtatgaattaaaatttatagatatttttttatttctttttagtggtatttgcttgcttactcgttcttaatataaacattgttttttatgggtttaatttaggtaaaaggttaggattggtgtttgattggttttcaagtttatcctccggttaaaatttgctcctcattgctcttactacagccggagggagcttgtaaaataccgtaggtcaagataggtagactgttttttaaaggtaaaaaggttttgttttcagttaaaaacagaaaaataatgactagaatacaaaatcatatgacgaaaatagttcgaatattagttttcgcatttctgatgcttatacctgtttgcggtgtagcgcaggataaaattaaaatagcatgcattggcaatagtataactgaaggggctgacaattatccgactcctttggctcgtatgcttggaaatcaatatgaagttggcaattttggaaagtggggccatactttattgcgaaaaggtgatcatccttatatgagtaccgatgcatttatcaatgcacagaaatttcaaccgaacgttgtaattattaaacttggtacaaatgattccaagccggagaactggaaatataaggatgaatttgaaactgatttagagtatatgatcagcacttttcagaagtgtggatctaaaccaaaaattattatatgtcgttgtattccggcaagtaataatttatatgggatccgtaatgaaataataaaagatgaaatttatccgatacaaaagaaagtagctaggaagtttcatctgaaattggtagatctgtatagcccattagaacataaagttgattcaacttgctatgtatgggataatgtacatttgaataagagcggttcgcttatattggcggagcatatatataaagctattacaggtaaaaaagctcctaaattggaaaatgcatttgctaactagaagaaaaatcatactataaaacgacacatgaggcgatatatttattttgtttttttattatgttgtgctgttaatctattgttaactagttgtgtacgacagaaatatgttgtaatggatatggtacaccataatccgggtgaggctatgacggaatcgaagtttctcgatccttcttttttgaaaaaaaatgaatatggagcaaaagtttttttcttgtttgaggctgcacagtttggaattgattggaagagttttgatccttctttattcccggatacgactgaagccggacgttgggtggcagaaaaagcagaaataatacataaaaaatatgatgcagcaaaaaaggaagaccttcaagtatactgtatgcttgatatgttagtacttccttctttgctggtagaaaaacatagaacagaacttactaacgaacaaggaaaacttgatatatcgaaaccttacactcagctttgtattcgtgaattgatgaaggaaatgtttgaaacgtttccacaattggatggattagtgattcgtactggagaaacttacctgcacgatgctccttattatgtaggcaatcatccagtacaaaatggtatgtatgatcatattacgttaattaatttgttacgggaagaggtttgtgaaagacgtaataagaagttgttttatcgtacatgggatatggggcaattgcattcgatccctaaatattatttgtccgttacagacagtatagaaccacatccaaatctttatttctctatcaagcataccatgacggatttttggagatcaacaattactgatcctgatatgaattataatataatggataaatattggttggaagaatcaggacaatatggtgttccttttaatccttgtataggtattggtaaacatcaacaagtagttgaagtgcaatgtcaacgtgagtatgaaggaaagggagcacatcccaattatatcgctaaaggagtaattgatggttttgaagaatttaagaaacctggtataaagaagccgtattgtttaaaccaagtgaaagataatcccttatttaagggtgtttggacttggtcacgtggcggtggctggggaggtccttatatcaagaatgagttttggatcgaattaaatgcttatgtcatctcacattgggctagtaatcctttgaaaacagaaaaagaaatactatatgattttgtaaaagcaaaagggcttcccgagtcagaatgggagatgttccgtcgactttgcctattatcagaagatggagtgataaaagggcaatatagtactatgggagatacttatgttaattggacacgtgatgacaccataacgggagatgtatatcaaaagagttattttgatcgtatgattgaaagaaatcaagtaaatgcttatctgaaagaaaaggaagaagctgttcgtatttggaaggaaatagaactgatatctcaaaaactacattttccctcagaagaattgaatcattttattcgtatttcctgttcgtatggacgcattaaatatgagctttttgctgtttcgtggcagattatgctatgcggttatgtggcagatacaacaaaaaagtcttttaaccggatagagatggataaatatattactgcatttgatgatttgtggaaagaatggaacgacttatctctagaaaacgataattgcccttcaatgtataagatttcttctaacttttttggttttcctgtaggtatacaagagaccattgataaatacaggaaatagttttcgttttttcttcttatatgttatagaatataaaaaaataaatgaatattacttagtggttagtattagtctagtcgtcttactattaatagtagcaaaaagtatgagaaagaaacataaaataacgaaagtaaaattatgatcattattattatataaattcttaaaaacggtattttctatgagaaacttattacaaaaatgttttaaatggcagtggcttgtctgcttggctgtaggctgctgcttttcgtcttgtaaagatgatgaagagtcaacttcgggctatgatccgaataagccgattgtgttgactgatttttatccgcccgaaggaaaacttgcaactcaagttattcttaatggatcgaattttggggatagtaaggaaaatgtgaaggtctttttcaatgataaagaggcttctgtcatttctgtgaaggatgatagaatgttggtattggctcctaaacgtgcatctacaatagaggacccagaatgtgtggttaaagtacaagtacatgaacaaatagaggagtacaagcagacatttgattattatatccagactactgtgactacgttagtgggaggaagtacatcggcacaggtgaatccaacaggaactataccactatctgaagcacaatttagagcaaatattgataggtgtatttgtgtagatcaggataaaaatgttttctttttagtagataatgatggaaagtttgctgcatttatgttaaatgaggaggctgataaattaatatctctaaagtcagatattaatgcgttgtttaactctcctgttttggggtataacagtaaggatgatattgtctatcaattctgggctaatagagatagtcatgaagtttattattttgaccctaagacggattatgcaccaactacagctataagttctatttcatgggatgatccaaattttccaaatattgaaggatttggagtatgggcagccaagtgtaattttacaatgggaccagatggaaaaatgtattcaagaatgttaggtggaaatctggtacggattgatgtagagaatgctagaggagagaatctaacgaatggggatttggttggaaccaaggatggtagtgcttatggacttgttttcgatcctcaagatgagaatgttttttatttctcaaataatgataagcattgtatttataaatatgatttacgtactaaagaatgtgcatgttgggctggtcaagaaggtaaaagtggatatttggatggaccaataggacaagctatgtttaataaacctggacagatgtgtgtcgattcagaaggtaatataattttgactgataccgaaaatcactgtattcgtaagataacaatgagtacaggttatgtatctacattagcaggaaaaccccaaaattcaggttatgtaaatggtagtgcagaagatgctcaattcaaaaagccattgggaatttgtattgataacgacgatgtaatgtatatcggcgactcagagaatcgtgctattcgtcgattagctgtcgaataaataattagtgaaactttatatttaatataatatgaatcgaatatttgtaatttttgctttgcttcttgcgtttgtagcacaagtacatgcacagaaagagcaaagctttatgttgactggtacagtcttcgatgaatttaatgaaccagttccgggagcaaatgtatatgttaaagataaaccaggtgtgggaataacaactaatattgatggtaaatttcggttaaaggtaaatatatatgatatagtggttgtgtcttttttgggatatgaaaactatgagcaacgtttgacgaataaaattgacaatgttaaagttaccttaaaaccggctacggagaatattgatgaagtagttgtagtaggtatgggtacgcagcgaaaggtcagtgttgctggtgcaattacaacgatggatccagcgcaactagaggttcctgctacaaatatagttaatacactagcaggtcgtgttgcaggtgtgattggagttcaatctagtggtgaaccgggcaaaaatatttccgagttttgggtgcgcggaattggtacgtttggtgctaatagtggtgcattagtgttgattgatggtttggaaggtagtttgagtcagatagatgctgccgatgttgaaagtttttctgttttgaaagatgctgcggctacagcggtgtatggtagtcgaggtgcaaatggtgtagtattggtaacgacgaagcgtggtttggagtccaaattgaagatcagtggtcgtgctaatatgacaatctcacatttaaaacgtttacctgaatatgttaatgccactcaatatgctgaaatggcaaatgaagcttctgttgcaaccggattatctcctatttataacaagacagaaatggatattataaaatatggcttagatccggatctgtacccaaacattgactggcaagatgttattttaaatcccaattctttccagcaaacttattatgtaagtgctcaaggtggtagcagtgttgcccgttattttgcaagtttaggaatgtcgaaagaatctgcggcttataatccatccaaagatagtaaatacaataaaggtgtaggctatgatacttataattatcgtttgaatttggatatagatttgactaaaacaactaaagtctatattggaacaactggctatatgtcggtgaatactcgcccgagcatgggggaatattctagaggagtcagtttgacagattggctatggagttcacaggcaaagactactccaataagctatccattacgctattcaaacggatattatcctgctgcaggaactaaggatgaaatatctccgtatgttctattgaattatacaggtaatgctagagaacagaataccaggaatttagttactttaggtattacacaggatttgtcgatgattactaaagggctatcagctaaagtacagggatcatgggatacacaaagtttatttggagaagcacgctataaaatgccagaactaaatgaagctttgaaggagcgtaaccctaatggaaccttgagttttgagaaaatagctgatgagaaaaccgttacatatagcagtgctgcttgggtttggaggaagctatatttagaggcaaatgttaattatgaccgtacctttggcgatcatcgtttaggtggtttactgttttattatatagaagatacatctgaaactggtgcagataaaagtatgaatgctataccaaagcgttatcaaagtctttcgggccgttttacatatggttttaaagatacatatttttgggatttgaactttggtttgaatggatctgaaaactttgaaccaggtaaacaatatggattctttccggcaggagctttcgcatgggtaccatcttcatatgaatttatacgtgaaaatgtaagttggttgaattttctcaagcttcgcgtttcttatggtgttgttggtaatgaccgcatcagttctagacgttttccttatctgaccctaataaaagaagaaaatgcttcaaatccttggggagggactggtagcttaacagaagaacaagttggtgccaataatttgatgtgggaaaaagcaaagaaatttgatgttggtatggatctgcatttgtttaaagataaatttactttgactttagattattttaaggatacacgagatggtatttttcaggaacgtaaacaaattcctgattatgtaggtttgattcaaatgccttatggtaatataggtcgtatgaaaagctggggtgctgatggaaatatggaattctatcaacagataggaaaggatgcacatgtgatattacgtagtaattttactttgagtaagaataagatattaaattgggaagatacaaagaagccttatacatatttggaaaataatggttatgctaataatgtacaacgtggatttgttgctatgggattgtttaaagatcaacaagatgtagaaatgagtcctacacaatttggtacggtacgtcctggtgatattaaatatcgagatataaatggtgatggtaaaattactgatgatgataaagttcctttatttgcttattcaggggtaccacagttgatgtatggtattggtgctgagtttcgttataaaagttggacactaaatgtcttgttcaaagggacaggacgtaataagttcttatatggcggttcggatggtagaaacttcgatggatacatgccatttaatcagaaggataaaggaaatataatgacaattgcttataatccggagaatcgttggatttctgctgaatattcaggaaatcaggctacagagaatccaaatgctcgttttccacgtttgtattatggaaaaaatgagaataatacgaaaccttctacattttggatgggtgatgcccgttacttgcgtttacaggaattgagcttggcatataatctaaaagttcctgcattacaacgtattttgggcattaattccatgaatattcagttgatgtgtgaaaatttggcagtatgggattctgtaaatatattcgatccagaacaagcgacatcttgtggacaggcttatcctttacctgcacgttattcattgcagctatatttgaatttctaatacgatgtataaacttaatagaaattagttcatgaaaaaatattttatattatcggttctgttattggtatccggcttttttgcttcttgtaattatttgaatatagatgattattttgaggatacctttcaagaagattctatttatgcaaataagcgtaatattgaacgttattttaatggggctgccgctctgcttcctgttgtcgataaaatttgggaatatgggaacactcctggagttacaggttcagacgaggctgtgagctgtggtgattggaatggtatggttgttatacaattctctggaacgaagttaatgaataatgagattacttctatttcaatgggcggttggacatgggatttcaatatttggcctaaatgttataaggtgattcgtaaggtgaatactatattgccacatattgatggtgttcgtgatatgaatagttttgaaagaatggaatttcgtgcaaaatgccgtttcttaagagcttatgcatattatttaattttgcaacagaatggtccaatgattttgttaggtgatgaaattgttagtaataatgaggaagcggagtattatgcaagaacgcgtaatacgtatgacgaatgtgtggattatatttgttcagaatttgatgaagctgctaaaaacttacctgatgctaccacttcgatggatcaatatattcctacagaaggagctgccttagctttagctgctcgtgtgagattacaagctgctagcccattatataacggtggagaggcagcccgtagattttttggtgattttacccgttgtacagatggagatcattatgtttctcaatcatatgatgaacgtaagtgggcacttgctgctgcggctgcgaagaaggttattgatttaggacgatatcaattatatactgttgctgcttctactgatgctgaacatcctgaatcagggaattatggtacatatgtagtcactctaccgcaagaggttcctactgcagaatttccaaatggtgtagggatgggagataaaaaagtcgtagatccgtatcgctcttatgccgaaatgtttaatggagagcttgctattaatcaaaatccggagttcatatggtgtagttctacagcgcaggttggtagccatatgggttacgtattcccattgaattttggaggatcttcttgtttatgtgtacctcagcatatagtagaccaattttatatggcagatgggcgtgatattaaaaattctagtagtgcatatccgtatatatcccgtccttatgataagacttgtgtgacgacagaagacaaagttttatctgaaggttataaaatcagccaaggaacatatttggcatatactaatcgtgaaccacgtttctatgtgaatattggttactcacatgcttggtgggcgatgggatctactactgaaagtgctaagaaaaatgttaatattgattattggaatggagctaattctggtaaaaatcattctaataataatgtttataatataactggatatacttctcgaaaatatatcaatccacaagatgctatgagtggtagtggggcgcgtcaaaaagataagtcatttccgattattcgatatgcagaaatattgcttgcttatgcagaagccttgaataatttaactcaagcatatgaaattgatggtcagacttatactcgtgatacagaagctatcaaatattattttaatcagatacgttatcgtgctggtattccgggattaacagcggatgatttgattacagtggaagcttttaataaagttgttcaacgtgaacgtttgattgagttattttgggaaggacaacgttattatgatattagacgctggggaattgttgaagatttagaaagggaacctttaatggggttaaatgtagaacaggctgaatgggaaggattctatcagcccactgtcattcagtataaatcaataattgaacgtgatttcaaacctaagatggtatggttacctttacatttggatgagattagaaaggtttctgttcttgatcagaatcctggttgggataaataaaattttaaatgtataaactatgaaatatagaaattttacaaataaattgatgcttatggtaggtgtgacagctactgctgttctcacatcctgcgagcaagagttttatcaggatgaacagtatcgtaaggaaatttatattgttagtggagaagataatattttccaacgagaattttctttcggcggggaggaaataggatacctttctgtttatgcaagtggtacaactccaattgaaaaagaagtgatggtagaactggaaaggaatgaaactgtattatcggactataatcaaaagagatatggggataattacaaaaactatgtcctggagttaccagatactcattataaagtagatgattggagtataaaattatatccaaatgcaaattcatcttattctttatttccaattaaagtaaatattgatgggttggaacctgaagataattactttcttcctttaagaatagcttctgtttctgactatatgatttcttctgcaaggaggaatgtattgatgcagatacttatgaaaaatgattatgcaacgactaaggagaagagctactatactatgaatggaacaagattgagagtagctaaagatacttgggaacctttggacaaaaagaataatgctccagattataaaccaataaatgccacaaagttagttgctccagttacggaatatggtattcgtattttaacgggatctacacttacatcggatagaaaagaactccgtaaacaagggattgttgttacggtccatcctgaggagatgattgatgttcctgttatcgggagtaatggattgccaactggagaatatatccaatgtcaaaaagtgacattagataaatggtataatgtaaatggtggaattacagtgttaaatattgaggataccccatcatattataatccagagaagaaagagtttacgttgaattatcgttataattataactcaaatgattggtatgaaatgaaagaggtgatgtctccagtggctattgctaacgaaaataattgagtggctgataataaatgataaatcttatgaaaacaagaaatatatatagtcttctatatgtaactttcgttgcagtggtgttagttgcatgcaacgattatgacgcagcgcaaactgcatatgaagaaatagtggatagtgatgtaacgactactcctccaaatatagattcggcatgggaattacagctaattcctaatgtaggtcagcatagtggtgaggtttttgtttataaagacaaaaagtatgataagctatttactcgcacattgggatggaatggtggaattggtgtgcaatctacatcattgtctgatggaaatgttctatgggcttttaatgatagctattttggagttgtagatgctgaaacaagagcaagaggtaattgtaatttcccacataatagtattatggtccaaacgactgttggtggtagtcttggagaaacggatgatgatctaagatggttagttgattatatacaaactaatgatcctgatggagaaggttattatcaggcgtatacacacatagctccagatgagactattatggaagaaacatatgaagagcatttctatcagataggtggtgctacgatatttgataataatggagttaaagaacttcaaatgttgtggggggaaatggataatcatgaaggtaaaatgactcgaactggtacctgtttagctgtttacagtttggaaggacagccgggtaatagtacttatcttaaaagaattagtaaaaacgaagaattcaatacagatgatgttggctatggttctactatatggaaagatgaagatggacatatttatctttatgtaacagagaataacagaccattagttgctcgcaccactactcatgatttaacttctgagtgggagtattacatacgtgatttaagtggtaactttatgtggcaaaagatgtatccgacgaaagaggagagaactcgctctactataatggaaaataattatgtatgtagtatgccacagatctttaaaaaaggagattactactatatgataggacaagccgtatcttatgttcattctgtttatttatatcgtggtgagacgccttatggaccttttacagatcaaaaaattttgtttaatgtcccttatgctgtggataagataggtaatcagtattataaaaatttgcttagagtaaatttgcatctagaacttgcacgagaaggtgaattagtattttctactaatactgatgctgatactgctggagataattttgattttccgggtagtgctgacttttgccgtccttatttttatcgtgttttcaattgggaaagtatatatgatgaagatgagtgatagctactgacgaattcatcttggtaaattgatttagaaagtcatttcttcataaaagggagaaatgactttcttttttaatatgttctgagctttcctgcatacaagtaaatttattaataaaaaacatgtaattgttttagtggtatatcatttttaaatcgtcattagataaataataataaagtagtacacatattaaaaagaactaataataatgaatattaccgtttttagagtttatcaactaaatttattaaccgctatttctatgtatatgaaaagcttattttatttattcctatctattgtaggtgcgtggcttttttcgtcttgctcagatgattttctgggtgagacagaaaccacggacttagatcaggcaaccgtattcgctgatagtacttatacggcagatttcttaaaccagatttatgtggatattggttttgatatccaacataatcggtataaagatcagtataatgatcatggaggattgcagactagttgtgatgaagctgcgtataaagctagtaccgggcttacgacagatgtaatgttcgctactggaacagtcaatcctgttactatttctgaagacgatgtttggagaattgcatatcgaaatattcgtcgagtaaatgtgttctttaaatatgcagatggatcccgaatggctgaagcggcaaaggaagagtataaagcagaagcacgctttttgcgtgcttggtattatgcaatgctattaagacattatggtggtgtggctttaattggtgatgatgtttatgaaactgtagaagaagcaatcaaggagcgtaactcttatgcggattgcgttgagtatatcgtggatgaagctaataaagctgcagaaacattgccagttgaaagaagtggaaacaaatttggacgtgtaacccgaggagcttgtaaagccttaatttcacgtgtacgtttgtatgctgctagcaaattattcaacggtagtgattttgcgcctgctgattttccaaaagaattgttagggtatcctacttatgataaggagcgttggaaaattgctgtagatgctgcccttgatgtgataaagatgaaacagtatgatttgtacattcgtaatgaagatgagaataatgaggcttatccgggatggggatattatgcacagttgttacctgctgattattatggaaaagtgggaacggaggtttattgcggtacaatctttgaaaagaaagcaggagctagtatagatacaaaccgatggtttgctcctcctagtacaggaggaaatggtattggagggtatgtttatcatgatttggctgaacttttcccaatggcagatggcacaccgactaaggatagtccagattatgaccctacgaatcctgctaacaaacgtgaccctcgtttcatgttcactgttacttatgatggatgcataatgaagagtaatatgcaggatactgaaattaatatatctgtgggaacacaacaggacgctatctatcgagggactccgacagggtattatacacataaattcttgaaattcggttcaatggcaaatcaaatgctttatggaggttcgcaagcacgaccattgatgcgttatactgaaattttgctgaattatgcagaagctgctaatgaatattatggacctgatcataaagatgtactaggagatcaagaaattagcccatatattgtattgagaaagatacgtgagtgtgctggcatagagcctggcgaggatggaacatatggaattaaaaataatatgagccaggctgatatgacagaagctattcggttggaacgtcggttggatttagcgtttgaaggacatcgtttctttgatgtacgtcgttggatgattgctgaagatacagataataggatgatgcatggttttgaaatcacaagaaatggtgagcggaagacaggaagaatcattgatactcgtcagcataccttccgtaaagcgatgtatttttatccaataccttataaagagactgtgaaatcaccggatttgttgcagaatccttattatgaataggaatgattgttatattaaaaataagaaatatgagatttaaaatacaaactacggttttacttttcgtcttattaggtactgtgagtgcttgcaatacatttaaagatgaaatagctcctgattcttatatggaagtaccaaagcagttagatgggaagtggcaattaaaaactgttgtacgcaatggaacggatatatctgaagtgatggactttagtcagtttcgtctgattatgaataaagataatacatataatattgaaaactatctcccttttttagtaaagaaaaatggtacatggagaattgataatttgacatatccttttttcttaacttttcaggaggaaggtgctgaaagagaagctataactgaaatcacttacccgattgtacaagggaaacgccatataacccttacaattagtccgggatgctcgagcaactcttatgtttattcttttgaaaaaatagaagaatgatttaaaaagaaaagcttatgaaatattattttaaaaaacatagaataaaaatcttttttttgttggtactttccttaatagtctttggatgttcctttttgattaaggaggtaaatgttaaacaagagaacgaggccggagagatggttgcctatattaaggctggtgaaattgcaacttttacgtttagtggagaaataaacatcgatggtgatgcaagcaatgaaacgtttattgttggattcttggctccaagaagttggaatgtacgtcagaatgcaactgtgacatacagagaagataggtatgaaacggaagtggatcacaaaatgacagtaattccagatactgaacagcctgcaaattataaaggtatgagttggtcagcggcattgaaaaaaaaatatggtgtacgaggcaatgtcttgaacgatatggaatggattgcatttaaatcggataactatcctagtgtaaatggaacaatacattatacagtaacaattaagtgtaattcaggaaaaagcaacttaaaattccgaccaagtttttttatcaatcactctagtgatgggattggaggagacgaggctcattattctgttaaggatgctgatgattgctttgaagtggtagaaggatcaggtactgtgattgatttttgttctacgcactattatcaaattgaacctttgtctgctttacaagatgattatgtaacattcacttttcaaggggatattaataccaatgaattgataaaagctgagaatgtgtatatagaagctactgcttatacgatagaaggaaagatatatacagtcaatgaaaagagtgcgaaaacactaatgaaaagagaaacgaaattgccaagatataatgtaactctttggcctggtggattttttaacattccggacggtgaaacaatttctcgtatagagtatattttcacaaatgaagatggaacagtatctatttcccagtcagatgacagtagagataatgaaggagaagaggtagaagaaggaataaaagagcctttcgtattcgaatttcaatgtgaatagagtttaaccttaaaaaaagattatatgcgtaatattttgaataaaagaaatagtcggtactgtttcacatgttttgtaatgtggctactacttggcttgggacatttgaatgcggtggctcaagaagcaggaggaacggctaatattacaggtaaggtaatcgatcaatatggcaatcctgtctcgggtgttgtaatcacgatgaagaatactgattttaagactgtgacaggtgatgatggtacttttgaatttcagtataagaagggcgatatgcttcgtttttctcatccaggttttttacataaggaaattaaggtgaacaagctaagaaatcaggaacgtatttttaaagtaacgttgacagaagagttcgtgaaatttccagatgtaataaatggaccttatgatacgaaagataaagcaagctatttaggttcagctgctacggtttatacagatcaggttagttcattgatgggaactactattcttccttcattacaagggcgtttaccaggactagatattgtacgtactcgtggtgcacgtaagagtcaaattgaatccagttcttctggaaccatctttaactttaatagccctacattgggtaaagaggcatatagtgataatacggaatttaatgttctatcacgccacaatgcaccggtggtggtagtggatggtgtgcaaagagaattatattctatcgatcctgatgctattgaatcggtatcaattcagaaggatgctttgtcatctatgtttttggggatgcgcagttcccgtggtgcattagtaattactactaaagatcctatcaaacagggatttcagttatcatt

SEQ ID NO: 4589 - DNA, 721 bp, Unknown
  gut microbiota DNA sequence
agataaacgatttatattcacaacgggggaagacaccggaacaggatgctaccctgtgtttggccatccttcagggatataatgtgtcgatgtacgccaatccggaagacgaggatagaaaacggtctgtcttgcagcgttctctgaccctccttgatgttcttcccccttctcttcttaaacaacagttgtctgcggtctgtcacggtatgcaggaactgtgtgaaaccaactaacttttttatttgtcaatgaaaatacaacgactttttagcattctacttttttgttctatgctgggaagtggctcgcttatggcccagtccatgagtgactcacaggtactggaatatgtaaaggacggcatccggcaaggcaaggaacagaaacagcttgcttccgaacttgcgcgtaaaggtgtgaccaaggaacaggctatgcgtgtgaagcagctctatgagcagcagaacaatgtaaacacctcccaatccacgggtacggatatcaacgagtcccgccttcgtgaagagactaaggagaatacttccgacatgctggaagatcatccgactacggaagatttggcccgtgaggaccaggttttcgggcgcaacatcttcaatacccgcaacctgacgttcgagcctagtgtcaaccttgccactcctgccaattaccgtctgggtcccggtgatgaagtcatcatcgatatctggggtgc

SEQ ID NO: 4590 - DNA, 58397 bp, Unknown
  gut microbiota DNA sequence
acgccttcttttttcatctccatatctgtcattgacaataagaaaacgccttcaaatatatgcttccgcaaacacttgaaggcattcatcatcctaaccaatacctatcctaaaaactatcttttacctatttattcaaaacgatcggcctattggcagaagctttaccaaaattcttggcaggctttttgcccatctcaaattttaaagtactgccgttaattatatcatcgtacgtaatataacttttatgataaggtttgccgttcagataaaccttctgaatatagatattatctttactattattcggtgcttcaacagtaaacactttaccaccacgcactttcacttctatctttttaaaacgaggactgccgaatgcaaacacaccgtcagacggattcacctgatagaatcccatagcagaaaggagataccatgcagacatttgtccacagtcttcattaccgatgataccgtccggctgatctgtgtagaagtcgctcatgatgaaacgaaccttttccgctgttttccactgttcgccggcataggtatagagataggctatgtgatggctcggctcattgccatgcgcatattgtccgatcagaccggtgatatcactggaagcaccttcacccatactgtcattgttcgtaaagaagctgtcgagcttcgatgtaaacggcttgtcaccgccaaacaggctgatcaatccatacggatcttgcggagcgaagaatgtatattgccatccgttgccctcacagaaatcgccgactccgtgaatagaacgtgccggatcgtacggagtacgccatgaaccgtcttccagtttcggacggatgaaatggatagaagaatcgaaatagttcttatagtaatgggcacgcttcgagaatgtctcataatcagccgtcttccccatcttttgtgccatagcggcgattccccagtcatctactgcatattccatagcgatggaagtagcttcgtggattttatcagcagggatatatcctttggccatcacgtaaggaactccgttctgcctttcataagttgctgtcgctttcatagccgccaaggcttcttccgcatcaaatccggtaaatcctttcagataagcatctgcaatcaccggaacagagctatatcccggcatacaatttgtttcaccgctcatcaaaggccagataggaagtttatcctgttgccgataaatggaaagcattgaattaattacattgtccaccatttcgggctgaatgatagtcatcagaggattcaaggcgcgataagtatcccaaagggagagagtggtataattcgctttcttcgggtctgtgtaaatcatatcattcatcccccgatactcaccattgacatcacaatacaatgtaggagcgatcatggtatgatagtgtgcggtataaaacacacgtttggcagcctcatcgtctgattctacggtcatcttatccaactgtttgttccagcggtcactgctcatcttcaccaccttgtcgaagtcccagtgagaaagttccgcttgcaggttcatcgctgcattgtcacaacttacggaagaaatagccactttaatctttacttctttcacattgccgaaagtaagcacacttttcaccgattctactttcagttgatcccaaagtttgggggtattatcgtcataagccgtaaatttctcgatcttctgatcgctcttcagcacaaagtatacttttcgcgacgggctccaccctctgacataccgataaccttccactgtatagtcatctactttgcggatatagctgtcgtatgcattggaaccgtttccttcacgcaggtcaatcagtatagaggccggttttccttcgggataggtataacgatgaaaacctacccggtcagtagctgtcagttcggccttgatattgtatctgtccagaattaaagaataatattccggacgggctatctcattgtcatgtgagtatttcgacgcataaccgtcacgtatatcatcctggttacctctgggagtacggatttcattgagaggcataatcagaatatcccccagatcggtacatcccgtaccgcttaaatgagtatgagaaaaaccaatcagaatactgtcggaataatgatatcccgaacaccaatcccagcctttatgaatattgttgggtccgagttgcaccatgccgtacggaacactcgttccgacaaatacatgcccgtgaaaaccggagccgatataaggatcgacatactgtaacaatccctcactctttgaatagtcctgttttgccactccgctcgttgccagacctaaaaagcaggaagcagccattaaaagtttaaatgcgttcatctgtatttttcttgttaattcgaaattgtttcatggtaggatttacttcatgaattatagttttcatgatgcaaatataaactctatttcgatactatcaggctgtcgccagagtttaccgaatggatggcagggatatttactcttttggcaaaagaaaaaggacttgcactgactaaagcagttcaaatcctttccataaatttccttcgggaagaggagcttcgagctctatcagctcttttgagacgggatggatgaatcgtaccttccgcgcatgcaggcaaatactgccatcgggattggaacgcggagcgccatatttaaggtctcctttaatgggacatcccatttttgccaactggcaacgaatctgatgatgacgtccggttttcaagtctacttcaagcagatagtaattctccgaatgtccgatcagccggtaattcagaatcgctttcttgctgttcggcacttctttgtcataagcaaaactcttgttctgcttctcgttacgtgccagataatgcaccaattcaccttccggctctttgggggcattctttactactgcccagtaggtctttttcacttcactggtacggaacatctcgttcagacgggtgagtgccttactcgttttggcaaaaataacaaggccgcttacggggcggtccagccggtgtgtcacaccgatgaaaacatttccgggtttctgatacttctctttcaggtactgcttcacagtttccgaaagcggtgtatcgcccgtcttgtctgcctggacaatctcggaagcggtcttgttgactacaattatatggttgtcttcgtatacgacagtcatactgttcgattacatattcataccaccatctacctgaatcacctgacctgatacgtaagaagacatatctgatgccaggaaggtagcgatgtttgccacatcttcaggagtaccgccacgacgcaaaggaattttctttgcccattcagctcttacttcgtcagaaagagcggcagtcatatctgtcaggatgaatcccggagcaatggcgttggcgcggataccacgagagcccaattcttgtgcgatagacttggccaatgcaatcataccggctttggaagcagcatagttagcctgtcccgcattaccgtgaacacctaccacagatgccatattgataatgctaccagctttctgacgcatcatgacaggtgtacaagcgtggataaagttgaacgctgacttcaggttcacgttgattaccatatcccattgttgttcgctcatacgcatcatcagcccgtcgcgagtgatacctgcgttgttcaccagaatatcgatacgtccgaagtccttatggatttcttctacgacctttgcagtatcttcaaagttagcagcgttagaagcataacctttggctttcacccccattgcttccagttctacccttgttttttctgcattttcgtcaatgaccaggtcagtaaatgcaatgtttgcaccttcggcagcaaacttcagagcgatagccttaccaataccacgggcggcaccggttacaatggctgtttttccgtctaataatcccatactaaaagttatttaattaaatttctgttctatgcagtgcgccaaacacaatgttggacacatatttatttcttgtttcttcgtccaaatgagctcctatatgcccacggatataaggaacttcaattcccttcacacagtaatgtatcaaatcggcagtcatctccacatcatcaatgtgaaacactcctttcgcctgaccttccaaaagaacagtcttaaaaatctggatttctttcgcatcaaatttctttcgcactttttctacccgccatatatcacggaagaaataagcacgcagggttccattccgataaacgacctcctttactgcatccaatcgggtatatatcagttccaacagtttgtcgtccggcgaaatatttttatcagccaccctcttcatcatatccgacaagatatccaattccgattctacaacagccaaatagatttcatccttacttttaaaataggtataaagcgttcttctaccttttttcgaagcgagggcgatatcgttcattgtagtgttctccacccccatctttgcgaaaagctggcgggcaacgtctactaacttggctttcgtttttgatacggtcataggttatacaaattgcacattgctgaatattttgagcaaaagtaattcttttctttagaccacacaagaaaacgcacagaatattaacatttgtatattaataggtactaaaaaaaagttccatcaatacttctctcattttcagcacaatatagataacacaatcttttttctaaaaaataattggagaataatttgttttattcaagaaaagccgtacctttgcacccgttaaacatcgcggagtggagcagttggtagctcgttgggctcataacccaaaggtcattcgttcgagtcggatctccgcaacttactaaagaatcgcttttcaagcggttctttttttatctctctccggttagattccactgtttacagttcgtttattcacaatcccaattttatatcaaccacgttatcaacaaagttattaacaggttaattaattagtaacaaacaaattaactatataagagactcatttttaaacaagcaggatgtgacttgttcacaacctcaagaagcaaaataagaatcacccgaatacaaaaaaaagatactacctcaaaaatcagtagtatctccttaattcttcttccgaaaggaagtacatccattcattacaatctatattacccttgtcttttttgccggttctgacgcccttctttcatctgtttctcacgttcagcctgttttttcacatagctatcgtattgttctttagtcataatcttcttcaactgggcatcataatcttcacgggacttcttcatttccgccatcttcttttcccgctcttccttagtcatcttggcagctttattatctttcgaacgtccgccctgattagcagccatcttttgcacccatgcaaggttgacatcctgtaattgttgcttttgatcttcattcaaagagtattctttcaccatacgctctgtcatacgttccgcgcgggttttcggatccatctgttgtcttccaccctggcgatttccttgtgccattgccacaccactcatcagtagcaaagctaccatccaaaatacgattcttttcatttcttttttcttttatagttaatctgataataaaccgattgcatcattgcaatattatatttgaccagattaaaacggaaaggttaaatcacatcgaggagattaacaataaataactttatgtttattcttcccgaccgaacgagcggtattcaagcggagtaagcccggtacgttttttgaaaaaggagaaaaaatattcggtagactggaagcccagaaaaaaagaaatttcttttactgactgggaagttcccaccaacatttgcttggctttacgaagtttcagttcctgaaaatatttggcgggtgcatagccggtatattccttaaaaaccctgcggaaccatgagtaactgatattcagtctcatcgccagttcctccggatcaatattgccggatacattttcattcataagtatctttgcctgctcgatcttctgatcgacatcactcatctcgaagaccttattcttggaaatcgaaagaatcataccaatcatgtgaagtacgattccggaaaggtattgctgggcagatattttatccgcttctgccacttccaaagcgcgggaaaacaaagataccagttcttcattaataccgacttccaatatctgtctttcctgagaaagaaaggcatcgcccacaatcgtatcaatcgccggaccttcaaaaccaatgtaatattccgtccatccggtctgccgcaatggataataagtatgccactgtccgggaaacaacaccatcagccgacctttacaaacttgtctttcaggagtagaatcggaagaaaacaaaccgcgcccttttgtaatatagaccaattgatattcccgcaatactcttcctttttcggcattgaaatagtaaccggacggatgctccttcagcggataaggagaatcgggagggatagactgatagccaaccgtattcacccacagaccgaatttgcggtccatgtcattaactatcaagtatttaaattctaatcccagattattatcctcagtcatacaggcgtgttttcatacaattgaattgaacaaaagtaggaattattttcaaaaaacacacgctaaacagtaaaaaaacatccggagcacctgtccagatcctccggatgcttataaaaaacaaaccttatacaattaaaatcagaatgctttccgatataatacttcaatctccgctactgacgtaggacgcggattaccacctgtgcaaacgtcattgaatgcagccaccgccaatgccggaatatcctcttccttcacattgatttcatgcaatttctgtgggataccgatactcagagaaagcgctttcactgcctcgatagccgccttcacaccttcagcttctgtcataccgtctgtattgacgcccatcgccttggcaatatggatatatttcggagcagccggagactcagcattgtactccatgacataaggtaacaacagcgcattggcaacgccgtgaggagtatcatagaaagcgcccaacgggtgagccatggaatgtacgattcccaaacctacattggagaatcccataccggcaatatattgagcctgcgacattgcttcgcgggcaactgtgtctttaccattatctaccgccgctttcaagttctgagcaatcatttcaatcgctttcagttcgaacatatcgctcatagcccatgcacccggagttatataactttcgatggcgtgagtcagcgcgtccatacctgtagcggcagtcagtcctttcggcatggaatacatcagttccggatctacaatagctacagcagggatatcgttcgggtctacacataccattttcttgcgtgcatcttcgtcgataatcacataattgatagtcacttcagcagcagttccggcagtagtaggcaatgcaaaggtaggaacagccttatgtttggtatcagccacaccttccaaagatttcacatcggcaaaatccgggttattcacaacaataccaatcccctttgccgtgtcgatagaagaaccaccacccaaagctacgataaagtctgcaccggaagccttataggcagccacaccattctgcacattagcaatggtagggttagcctttacatcactataaagttcatacggaatatgattgtcatcaaatactttaatgatttcggccgcaacaccaaatttgataaggtctttatctgttacgaaaaaggctttcttaaagccacgtctggctgcttccacagcaattacactccggcatcctgcaccgaaataagaggtctcattcagaataatgcgattcatagttgtgtcataattttaaagttaccgcaacattctccatcgatagaaaatgctgcggtcgctaaagtagataaattcagtgattaatacaagtattatttaggaagattgaaagcaacggacatttctttcatttgttcctgactcataccatccggttcgaagcccatattcttcgcagcaatatagatcagcgccgacttattcagcacgtcaatctgatcaaaagcctgcatagcatcgcagtctacggcaaaaacaccgtgtttttcccacatgactacatcatagtcctgcaattccttgatagtggcttccgccaactctaccgaactaggcaatttataaggaatgatacccagacctctcggacagaacgccttcgtttcaggaatcatactccataacagattggttgccacatctttctgaaggaacttctcgcaatgagtcatggcaatcagttcgatcgggtgagtatggacagatgctttataaggagaattcttgctcagcaaatcattgtgtacgctcaggtgggaaggcagttccgaagtcggcgccaccgcttcgtcggcaatgatcacatagctggcgcaatcatcctgaatgcggatcaccgaaccattttccatcggccagcgagccagatcacgcatgcgtttgttggttcctttgcaataaaagtaacatcctttcagataaggcaatgtaacgccaatggattttacttcgctaatcggttccatccgacggatttcatcgtctacaaactctgtgatatttacggtgatattaccaccgttacgttcagcccatcctttttgccacaagtatccggcaacttcagctaccttgtttatttctttggcaagtgccggacgattttctaaaattgatttcatatctatttattattaaaacaagttcgggaataccagcgagaagatcaagactaccaaaccacagatcaacactgtgattgttttggcagatactcctttccactctttcaggatgattccccatacattactaaaggttacgttcagcgccatcaggatacaccatgagaaagccagcaacacgggactttccgtgaggaagctcttacccatttccaatccgaagaactgcatataccacagcacaccggccaacgcacagaagacgagattgttaccccatacctttcctttggcatagtcaccgacagacttattagctatattctgctgcaggcagtaagcggcatttgtcatgaatccgcctaaagtcacgaggaagataacaggaagacctgcataaagtccatccacaccacctgccaaagcagcttccttgataggagttccggcatccagtcccaaagcaaagcaggcactcatcacacccgcaagaagtgctaccagcaaaccttttgtcaatgcaaagtcttttacggcagcccgtttttcttcttcgctcatattctgtgcacgcaagccaccggcataaccaatgatagcaatacccgccagcgtaatacaaactcctagaagaagaattagtccgttaccttcgaacagattggttccggcgaagatggcaggaaaaagggttccgaatccggcacaagtacctaatgcaatactttgtccaagcgcaacacccagataacgcatggagagtccgaaagtcaatccgcctattccccataatacaccataaaagatgctcattccagcacctccggctccccacaagtcgaacaaactgcctcctgcgggtatccccagcagtgatcccaggaacgggaacactaaccaggcaaacacaccttgtactaaccagaagctttcccagctccattccttcacctttttaataggtacataggaactggactggcaaaagctaccgatggctataatcaacaagcctattagaatatccatcacttatcgtttagaagttacttccgcttcgtacttttcgatttctgcaatgaaatcttcgcctaccggaacgttgttcttcaagcagaacatatcccatactgcattccatggaagcgctttctcttcttcgagcagagccagacgctggaatccctgtccgttagcttcgtattcacgcagcttggcaatcggttcgagcaaagcacgtgtcatacatttctgagcagcacggctaccgacaacgtaagcaccgatacggttgatagaagcatcgaaatagtcgagaccgtagtgtacgcgttccaacgcaccgcaacgaacaatttcactgaacagttccattgtaggatcatccataatggttacgtggtcggaatcccaacgaaccggacggcttacgtgcagcatcaattcgggcacataaagcaaaagagaagatactttgtcggcaacactttcagtcggatggaaatgaccggtatccaaagttaccatcttattacgggatgcgccataaccgatgtagaagtcattggaacctactgtatagctttccagaccgataccgaatacttttgattcaatacagtctttcatgtttttatattcagtagcaaatatctgatccagagaatctttcaacaatgcacgatatttcatgcggtttacagtgatatccttgcttccgtcatgtacccaaagattcatgatacacgggtcaccctgcgccttacccatttcttcggcaacggcacgacaacgtttggtatgctcaatccagaactgacggatgccctcatccggattagacagtgacaaatcaccagatttcggatgcgagaatgaagtagagttgaaatcgagtttcatgttatgctctttaccccattcaatccagctcttgaaatgttcaggctctacctgatcgcggtctaccactttaccttgaaaatccccgtagatttcgtgcaggttcaaacggtgtgtacccggaatataagaagcggctttcagaatgtcggcacgcagttcatcaatattgcgagctttgcccggataattaccggttgcctgaatacctccgctcagtgcacctgcctgcacttcaaatcccgttacatcatcagcctgccagcaatgaagtgacaagtggaagtcctgcatggttttcagtaccttttcagtatctacacctactgctgcatagcgttcaacagcaatctcatacgctttctgaatcatttcttcttttttcatgatattctattattaaaagttaatattattctgtcggttatttcttgattctccggaatttatcgaacgcagtttttaaaatggatataagccgcatcccaagctgccatatcctgtgggtgataagtcttcaacggaattgaacggcttatcaactgacgcataccagcaacatccgtcgcctctcccatcgtcattgcctgaatcatgacattaccgatagctgttgcctcagacggtcctgccacaaccgagatgccgatagcattagcagtaaactgattcaacaagtcattacggctacctccaccgatcacatgcagagtttcgataggacgaggagaaagcgcacgcaagttttccaacacctgacggtaacgcaaagccagactctcaaagatacaacgtactatttgtccacgttgctcaggaaccggctgcccagtagtccggcaatattcacgaatggcctgttccatatccgcaggatttgcaaaacagtcgtcatccggattgattaaactacggaatggttcacacgaatccgcttcggttattaattccggatagcttgtatctccccaattcagacggcaacgttccagcaaccacattccacaaatattcttcaaaaggcgaattgtgccttctacgccaccttcattcgtaaagttcaaagcctctgtttcagcagtgattaccggtgcatctgtttccacccccatcagcgaccaagtaccgctactcaaatatgcgaaattacgatcaagtgcgggaacagctgctacagcagatccggtatcatgtccggccaccgcaatcacaggaattgcccccaatcctgttatcttttgcacttcttcagtcaatgttcctatcttctcacctgggaagacaaaacgaccgaaattctcttcttgcagtccgactgctttcagcaactccggttccagacgttgcgtatgtgcattcactaattgggcagtggaagcaatggtatattcagttaccatcttcccggtcagcatatagctcaacgcatccggcataaacagaactttgtctgctgcctccaatgcactgtcatgattgcgacgcaaagtatctaattggaaaagtgaattaaaattcattacctgaataccagttttaccatatacctcgctacgagagatacgagagaaaaaggcttccggtgctcctaccgtatgcggatcacgatatgcataaggctggcgaagcaggtttccatcttttccaaggaggacgaaatctactccccatgtatctataccgatagaggcaatagattcgccacggtgagctaccaatttcaatccgtcgataatgtgacggtataatgcataaatatcccaatagaaatgtccacccacctcgatcaagtggttaggaaaacgattaatctcctccagatttaatccgccttcaataaaagagcctaagattgtacggccgcttgttgcgcccaggtcgactgcaaaaaagttctgtttcatggtattttgtctatatatttaaggtatccatttacctacattgcaaagataggcggttccttcctccttttccttacgcattttgatagaaaggatgtgcattttgacacaaatctgcatagccaaaccttacatcagtataaattttactttttatgcaaaaaaagcatgatttatgcatgttttctccgaaataatgcataattttgcgccattcttagaataattatacaatgaagaagaaagcaaatcggttagacgccatcaaaatgattatctcaagcaaggaggtaggctcgcaggaagaactactgcaagagctgaaccgtgaaggcttcgaactgacacaagccaccctctcccgcgacttgaaacaactgaaagtagccaaagctgcaagtatgaacggcaagtatgtatatgtattgccgaataacatcatgtataaacgttccactgaccagagtgccggtgagatgttgcgcaacaatggatttatctccctacagttttccggcaatatagctgtcatccgtacccgtcccggttacgccagcagcatggcttatgatatcgacaacaatgagttcagcgagattctgggaaccattgccggcgacgataccatcatgctggttctgcgtgaaggagtagccacaagcaaagtacgtcagcttttgtcgctcatcattccgaatatcgaataactatacctatattatatataaagaaatggacactcaacaaatagatgttatggtagccgacgcctcacatgaggtttacgttgacactattttggaaactatcagaaatgctgctgccgtacgaggaaccggaatcgcagagcgcacacacgaatacgtagcgactaaaatgaaagagggcaaagcaataatcgcgctctgtggcgacacattcgcaggtttcacctatatcgaatcatggggaaacaagcaatacgtagcaacctccggtctgattgtacatcccgattttcgcggattaggattggcaaagcgcatcaaacaagcatctttccaactggcacgtctccgatggccgaaagctaagattttcagtctgacatccggagccgcagtgatgaaaatgaacaccgaactaggatatgtccctgtcactttcaatgaactgacagacgacgaggctttctggaaaggatgcgaaggctgcaccaaccacgatatactggtagctaaaaaccgtaagttctgcatctgcacagccatgctgtacgatccgacagacccgcggaacataaaaaaagaacaagaaagaaataacatttaatatatacagcactatggaagaaaagaagaaaaaagtagtggtggcattcagcggcggactggacacatcgttcaccgtcatgtacctcgctaaagaaaaaggttacgaagtatatgcagcttgtgccaatacgggcggtttcagcgaagaacagctgaagacaaacgaagaaaacgcctacaaactgggagcagtgaaatatgtaacattggacgttactcaggaatactacgaaaagagtctgaaatatatggttttcggaaatgtgctgcgtaatggtacttacccgatctctgtcagctcggaacgtatcttccaggcattggccatcgcacgttatgccaacgaaatcggtgcggatgccattgcccacggttctaccggagcaggtaacgaccagattcgttttgacatgactttccttgtactggctccgaatgtagaaatcatcacgctgacccgtgatatggcattaagccgtcaggaagaaatcgactatctgaacaaacatggtttcagtgcagactttaccaagctgaaatactcttataacgtaggtttgtggggtacatccatctgtggtggcgaaatcctcgactccgcacagggattaccggaaacagcctacctgaaacatgtggaaaaagaaggcagcgaacaactccgtctcactttcgaaaagggagaactgaaagctgtcaatgacgaaacattcgatgatccgatccaagctatccagaaggtagaagagatcggtgccgcatacggtatcggacgtgatatgcacgtgggcgatacgattatcggcatcaaaggccgtgtgggtttcgaggctgctgctccgatgttgattatcggtgctcaccgcttcctcgaaaaatacacattgagcaaatggcagcaatactggaaagatcaggtggccaactggtacggaatgttcctccacgaaagccagtatctcgaaccggtgatgcgtgacatcgaagccatgcttcaggaaagccagcgtaacgttaacggtacggcaatcctcgagctccgcccgctttctttctctaccgtcggtgtagaatcggaagacgacctcgtgaaaacgaagttcggcgaatatggtgaaatgcagaagggctggacagccgaagatgctaagggctttattaaggtaacttctactccgctgcgtgtttactacaataaccataaagacgaagagatatgattaaagcaggaatcattggtggcgcaggatatacagcaggcgaattaatccgtctgctgctcaaccatccggaaactgaaatcgtattcatcaacagcagcagtaatgccggaaaccgaatcaccgacgtacacgaaggactatacggagaaaccgacctgagatttaccgaccagttacctctggacgcaatagatgtactattcttctgtaccgcccacggtgacacgaagaaattcatggaaagccacaacgtgccggaagatttgaaaatcatcgacctctcgatggattatcgcatcaagagtgacgatcatgacttcatctacggtctgccggaactgaaccgtcgtgctacctgtacggcgaagcacgtagccaaccccggttgttttgctacctgcatccagttaggtttgcttccgctagccaagaatctgatgttgacaggcgatgtttcggtcaatgccatcaccggaagtaccggtgccggcgtgaagcccggtgctaccagtcatttcagttggcgtaacaataacatcagtatatacaaggccttcgatcatcagcacgtgccggaaatcaagcaatcactgaaacagttgcagaacagcttcgattcagagatcgactttattccttatcggggagatttcccgcgcggcatctttgccactcttgtcgtaaaaacgaaagttgcactcgaagaaatcgttcgcatgtatgaggaatattatgcaaaagactccttcgtgcatattgtagataagaatatagacttgaaacaagtcgtaaataccaataaatgtctgatacatctggagaaacatggtgacaaattactgattatctcctgtatcgacaacttgctgaagggtgccagcggacaagcagttcataacatgaacctgatgttcaacctggaagaaaccgtaggattacggctgaaaccttccgctttctaaaaacagaagaattatgaaattattcgacgtatatcctttatatgacatcaatatagtcaaaggacaaggctgtaaggtatgggatgagaacggtacggaatatctggacctctacggaggccatgccgtcatctccatcggacacgcgcatccccactatgtggagatgatcagcaatcaggtagcaacccttggtttctattcaaactcggtgatcaataagctgcagcaacaagtagccgaacgattgggaaagatttccggttatgaagactactcgctgtttctgatcaacagcggagccgaagccaatgaaaacgcgctgaagctggcttctttctataacggacgcaccaaagtcatttctttcagcaaagccttccacggacgtacatcccttgcagtggaggctacgaacaaccccaccatcattgctccgatcaacaacaacggtcatgtgacctatctccctctgaatgacatcgaagcgatgaagcaggaactggcgaaaggtgacgtatgcgctgttatcatcgaaggaatacaaggagtgggcggtatcaaaataccgactaccgaatttatgcaggaacttcgcaaggtttgtaccgaaaccggaacgattctgattctggacgaaatccagagtggatacggccgtagcggaaaattctttgcccatcaatacaaccatatccagccagacatcatcaccgtagccaaaggcatcggaaacggattcccgatggcaggtgtactgatcagcccgatgttcaagcccgtctacggacaactgggaactacattcggcggaaatcacctggcctgctcggcagctcttgccgtaatggacgtcatcgaacaggacaatctggtagaaaatgcaaaagcagtcggcgactacctgctggaagaactcaagaaattcccgcaaatcaaagaggtgcgcggacgcggactgatgatcggactcgaatttgaagaaccgatcaaggaattgcgcagccgcctcatctacgacgaacacgtatttacgggagccagcgggacgaatgtactccgcttattgccccctctctgcctcagcatggaggaagcggacgagttccttgcccgtttcaaaagagtactctaactgatatttgattaataaacagcgaacaaaaaagcagcctcgaacagaaaaacagttcttattcaggctgctttttgttttttcgcaatttaccgttacctttgtctgtaagaatacattaaaaaagaagcgcatatgaaaatagctattatcggtgcaggaaacatgggtggttctatagcccgcggcctggcaaaaggaagtctgatagcagactcagatatcattgtatccaaccccagcgcaggcaaactggagaaactgaaagaagaatttccgggcatttccaccactctgagcaatacggaagcggcaacgggagcagatgttgtcattctcgccgtgaagccttggtttgtggagtccgtcatgcgcgagttgaagctgaagagcaaacagacgctcgtatccgtagcggcaggtatcagttttgaagaactcgcacactttgtgatagcaccggagatgccgatgttccgcctgattccgaacactgccatcagcgaactggaaagtatgacgcttatcgcggcacgcaacacgaacgatgaacagaacctgtttatgctccgcctgttcaacgaaatgggaatggccatgctcatccccgaagataagatagccgccaccacggcactgacttcctgcggcatcgcttacgtattgaaatacatccaggcagccatgcaggccggcatcgaaatgggcatccgtcccaaagatgcgatggaaatggtagcccagtccgtcaagggagccgccgcattaattctgaacaatgacacccaccccagcgtggaaatcgacaaagtgactactccgggcggaattacgatcaagggaatcaacgaactggaacacaacggatttacctccgccgtcatcaaagcgatgaaagcatccaaataataccgcaaaattattaataatcaaaaaacaaccacttgtatgaatgaccaaattaaacagatcgcagaacgccttcgcggattacgtgacgtactggaactaacgtctgaagatatcgcccgcgactgcgacatatctgccgaagaataccggctcgcagagacaggacaatacgacatttccgttagtatgctacaaaagatagcccgtacctacaacatcgcactggatgctttgatgtttggcgaagagccgaaaatgaacagctacttcgtgacccgtgccggcaaaggagtcagcatcgaacgtaccagggcttacaaataccagtcactggcgtcgggcttcatgaaccgcaccgccgatcctttcatcgtcacggtcgaaccgaagggagacgatgagccgatccattataaccaccacaacggacaggaattcaacctggtggttgaaggccgtatgcttatcaacatcgagggcaaggaaatcatcctgaaccaaggagacagtatttattttaattcaaaacttccacatggcatgaaagcgctcgatggcaaaacggtacgttttctggccgtaattatgtaataacgttatggtagaaagatttttagcacagactagctttgcctcacaagaggatttcatcaagaacctgaaaataaacgtaccggagaatttcaacttcggctacgacgtagtagatgcctgggctgccgaacaacccgacaagaacgctctgctctggaccaatgaccaaggcgaaagccgtcagttctccttcgccgacatgaaacgctatacggacatgacggcctcttacttccagagcctcggcatcggtcgcggagacatggtgatgctgattctgaagcgccgctatgagttctggtacagcaccatcgccctgcataagctgggagcaacggtgatccccgccactcacctgctgacaaagaaagatatcatctatcgctgcaacgctgccgacatcaaaatgattgtggctgccggcgaaggaatcatactgcaacacatcaaagatgctcttcccgagtgtccgagcgtggaaaagctggtcagtgtaggtccggaagttccggaaggattcgaagatttccatcagggaatcgataatgctgcccctttcatccgcccgagacatgccaatacgaatgacgacatctcactgatgtacttcacttccggcactaccggcgaacctaaaatggtagcacatgactttacgtatccgttaggtcatatcgttacgggtagtttctggcacaatctggatgagaacagcctccacctcaccatcgccgataccggctggggaaaagccgtatggggaaaactctacggacaatggatcgccggagccaacattttcgtctatgaccacgaaaagttcacgcccgcagctattctggaaaagatacaggagtatcaggtgacttccctttgcgcacctccaaccatcttccgttttctgattcatgaagacctgactaaatatgacttgtcttcactgcggtattgcaccattgccggagaagcactgaaccctgccgtattcgaaaccttcaagaaactgacaggcatcaagctgatggaaggtttcggacagacggaaacgacactgacagttgccaccatgccttggatggaaccgaaaccgggaagcatgggactgcccaatccgcagtatgacgtagacctgatcgacagtgaaggtcgctccgtggaagccggagagcaaggacaaattgtgatccgtaccagcaaaggcaaacctctcggacttttcaaagagtactatcgggatgcagaacgtacacacgaggcttggcacgacggcatttactacacaggtgatgtagcatggaaagacgaagacggatacctttggtttgtaggacgtgcagacgacgtaatcaagagttccggttaccgtatcggcccgttcgaagtggaaagcgctttgatgacgcaccctgccgtcatagaatgtgctatcaccggagtacccgatgagattcgcggacaggtagttaaagctactatcgtattgtccaaagactataaagcacgtgccggagaagaactgatcaaggaattgcagaaccacgtcaagaaggtgactgctccttataaatatccgcgtgtgattgagttcgttgacgaactgcccaagactatcagcggcaagattcgtcgcgtggaaattcgcgagaacgatgagaaataaggcataaaacccatttataaaaaagccggctgcaaaggattgcagccggcttttcttttcactagtaagtatcggattctctaatcaattgataaagctccaaccatccgcttaatcattaggatgatagaaattgtattgttcactccatgcaggaattccggtaagcgttatatcattaccgttcgggctattatccttcaatacatttccttttccttcatcacacttccaatacccaatcaaaccatccgaatctccggatatctggcgtgacattccttcctgaatagcgttctctgtcaggcatttgctccaaagacgaatctgagctaattctacctgcatattccagccgaaactctgtgctaaagaaatattattgaatgtaaagtctcttgaatcggctttactattattcaatgtaccatctttatagagggaaatagtagatccgtcataagtataagcaatgtgataccatatatccggataccaaaattcctcactatcaaaatagtttccatccaactgacactgcaaacatggcgcaatcttttttgctccatccgcccaataacgcaataaaacgccattgaaagaaataggagccgaattgtctgcgaaaattaatcgtctgaaagcaatattggcaggacccacccaatctcctgtcggtctgcccgttgtattatcgaacttgatccaatactctatagtccactgagtaacaggtatttcgtttttaaagttcagactggttttatttgctgatttcaaaaccaccgctttctgtttattaggggaagtaagcagataaagaatatggtttgcgttaccaacaagtcctatcggtccggctacggaagtgatccgtaccggaatcgcataagcctcgttattgggggtggtaaacggctttatagtaagattaatgactggtgcagacacttcacctgcgggaatcgtaactgtgcgttcaaaacttctgaattcttccggcaaaagttcgtaagacgcttcatgctgttgattatactcatcaatgagttgctgatcaatatccagtgttacagttacatcttgatcaatagcacgaaccaaacggacggtcaatgtttttatcacatctccctcgtccaccaattgtgcctctatctgctgactaaacgtattagaaggagccgcttccgcaatatatactccattatcgatagttgacagttttgcatcgttgcatccggtgacaacagccaaagctgcccccagcacaacatatcttgaaaatttaatcatcttcataattatccttttttagttatgttcttgcaattaatgattagcgggattcagaacctgaataacctcacgcataaagaaatagtcattcaccggacgacaaagattaaaacggtaggcacccactccgccaatgcgggcatctactcccggacgatagtacatcgccattcccttcaatgaataagtcacaataccatcacgagttgtaaattccggtccgccatcccctttatgcttttcaaagtcctcacaccaaactgttttactaagaatcgtagcttcatcctctatcgaaccgaatttatttaataatctgtcaaaacgaccatccaaagcatcactatatccctcatccgacctacagtaataggcttgaaccacataataatctaataaagggcccgactccttgttcagtgtctgcggttctccgtcgaccatcaatatacgtccagttcccgatttcggtccgaattctttcgataattcatccaaaaaaatatgcatacggtccgaatttccactcagatttccggaatagccaaaattcggttcaaagtcgatatcgaatccatcatagttatacttattgattgaatcaataatcacccgcgcatatttacggatagctttttcttgtccttcttccgaagtgtcaccataattgccataccacccccaataagcagccatcgcttcatccttagagttgtactgtacgccatccacgatgaaatcattctcaacagaagcaggcgtatgacttctgcctatatctgtgatatgctgacaatacaaaactctgagacctttcttctctctcacttccttaaggtcacttttttgtgcttcagtcaggttgaaagcccctccccaaagagagacgatatccattgaatcgggaatacctctcaactggttgttcatattcgttccggttccggtccattcactgtaccagccgaaaacaatcggatgatcggatttcttatactctctcagtgccttataatagtcttcaccattgatattcaccggttcggtgaacttcggttccatttcagtccagtcgctgcactgtataaacatcagtgcacccattactccaaatatgatatataataatttcttcatattgttattcctaatttaagctattaataagtaccattttctttcattgcccaccaaagatcagttccattagaatcttttccattgctaagcatactgacggccgcttccacattcgccttattgttattgtattcacttcgtgtaaaacgaagacggcgttgtccgcgccccgtattacaatcggcattcatagattcagttgccgggaagattctaggatagcctgtccgacggaaatctgcccatccgttcatcgggtcgggataacaggcaatccatttctgggtaagtactctttccagtttcttcgcgtcatcagctccatcctcccacttgatcgtaatggacgactggttcgtataattgtttccggtatgtccggcaattaaattatccacataatttcccggtatagatgtagcgtcagccaaataatcatcggcacccgataccccaaattcctcaaaagacaatcgaactcccttttcatagaaagtcttggcatctccacccatattccagcctttcagtgctccttccgcacgcaggaaagcagcttcggcagcgtacattaccggttgtggcaatgttttgtcggtagcgataaagagtttgctatagttggcgtataccgtaggttcaggtatttctgccgaacccgaacggacacctacatacccaccggcagcagtctgagtctgcggagtaaaataagcaggacggcgaggatcgttatatccgttcatgtacgacacgaggcaggcattggctcttacttcgggccatccgctgacaatagcatatccattttcattgattccgccattagtcgtatcataagaactgtcgcccacactttccatcacacctccaagtacagcttcctgagccttggtctgagcatattccggttctactcccgagatgcggatagccatccgaagtttcagcgtattggcaaacttcagccacttcgagcagtcacctttatagaactggtctaccacagccaaatcttgatttacgccgaacgttgccgccgacttcagaatggtgatcgcattatccagatcgtcaaacatggcatgccatacagtctgctcattatcataaggggcttccgtttcgccggccttcatctgtgtgtaaggaatgggaccttgcaaagatgcgagcaactgcataccataaacacgggttaactgagccatggcataaatgacacctttcttttccgtagagttctcgaccagaaagaaagaaggatagatatagccgtagagtcttccccatgaactgtcattgtgcccttcggacgcattataataagcaaagatattctttccaaagctccagttagctgtcgcagtcacttgaccgctaaagctggcccacatacaattaatctcctgacaagcattctgttgcggacaagcatacacgttaaacatcgtagacagtaagttacttgccggtacttttgaaggctgataagggttggtattaaaatcttcaaagttagtagtacaccccgccatcatacatacgactgcgcttgctccgatatattttattatcttgttcatacctatttattatttaaaactgaaatttaacattgaatccgaaatttcttgtactcggaagcatataggcatcaaatccctgatagaagttagatgcagctgaagtggtcagttccggatcgaaaggagccttgcaataaatcatccataaattctttcctaccagcccaacagtcattccgaccttattgtcaaaccattttttaggcaatgtatagctaagtgaaagttcgccgagtcgtacattggtagcgctatacgtgtagtaagccgcagttccctgaatggtctgatagtaagtctgtgcagagactttgctctgattaatctgcacgcctcctgcgtcacgtacgtccgcgctgactttggaaacaccggcagcgtcaagtacggactgcgtctcactgataacaatacctccgaaacgtccggtgaaagtcatgccaagattaactcccttataaccgaatcctaaactccagcccatattcatcttaggcagaatagaacctaagtaggtttctttgttctccatagccagtccgacaccttcttcattaagaatgtagccattcaagtcacgtttgagcaagcgttgtccgtatacgtctcccattgatcctccgacacgcaaaatcaggcgggcatccgtatgtccataagtaagcggagacagttccggcatctggataggttgtccggtggcatagttgtacacaccgtcagccaaccgttttacccggttcttattccatgtcaatgtatagttcgtattgaaagagaaatctttccactgcttgttataacccaatgacatttccagaccttcgttcatgatgtttccactttggataggaatattagaatatcccgaagaaagcgacaagtccgcatagaatgtctgattataagtattggaacgataataagtcaagttaagactgatgtcattgaggatacgtgcgtccaaacctacttcccatgacttggtacgttccggtttcagtttcgtgttcggataagaagaggtactggtccagctctgtgtctgttcatcgtaagggtaagtaacggtagtcatgaagcggccgtaagagttacctacctcagtgtacgaaccgcgaactttcaggtatgtcagccaatcaggagcattaaacatactcgtcagaatggcggaaagtcctattgacgggtagaagaaagacttgtaatcggagaaagccagtcttgaatcccagtcgttacgtccggtagcagtcagatagatcatcgatttccaaccaatttccgcattggcaaagatagcgcgtgtctgatcatgccagccggactgttttgctttccatgctttattgaaatcgatattgtggacggcaaagaaattgataagtttcaatccgccttcatatccgatcatttcataacggctgtcactcagtgacacaccaaggttgacattgaccgaccagtcgttaaaactcttattcagtgtagcaatcgcatccgcatacgtgttctttgattgtgtagaggtgtcactgtacgttccacggtcacccgacaccagtgtgccggtagaagcgtatgccttataagtactacgattatcataattatctattttcacacgtcctaccacatccagccagtcgaacaactgatatttgagggaagcgttgatcatataacgggtcttcttattctcccgcaactggcgattctgtatccagtaggggttggcaagaccacttgaagtaccgccgtaaggccagtattgctccatcaggtccataccggaattataacgttcgaacatacgtacatcatcgaaattctcactacgagggaaacggtaaagtcccggcagaggattatagtaataaccctgcgacatcatattcttgtcattctgaagaatataactggcaccggcatcgagtgtcatcttgtctttcaggaaactggtcgtgttacggacagtgaaattatagcggttgtatccactgttgggcaatatattggtggtgttggtagtagaagccgacaaatacgcctgattcttcttgttaccggttgacaaagcaaatgagttaatgacattcgctccggtctggaagaagtcacgcggatcgtagtcactgtttacaatcggtccccagctatccaggctgttgggcaggttaccatatttgctctgcatctcaggcatcattgacaccttcgagaaagtagtattattggagaccgtgacagaagtcttgtccgcagaccccttcttggtggttatcagcacaacaccggcagcggcagcattaccatacagagctgcggcagaaggtccggtcagcatagagatagattcgatgtcttccgggttaatgtcggcagcgccatccgtaccctgctggtcatagataccaccgccacctccattcatcatgttatacatcggtacaccgtcgatcacataaagcgccagattggaagaagtgatagatttgacaccacgcatcacgacacgcgaagcacctcccgtggtattggacgaattaatattaacaccggccaccttaccattcagagaagagatgaagttcgcatctttcacagtagtcagttcatcaccgctcagctgctgcacgttgtatgacaatgccttctccgagcgtttgatacccaatgccgtcactaccacctcattcagttcctgcgtcgcatcctctagcaccacattggcaacatttccttttacgggtacttcttttgactgataacctacataggaaaatacaagaacaggattcgccgatgaagtggaaagcttatagtttccatccatatcggtgatggttccctcaccggaactcttctcccggatagagacaccaatcaacggctctccattcttatcttttaccgtgccggcaataagtctttcttttctctgctgtgcaacgtctttttcttttgcagccagtactattttattatccaaaactttatattcgatgcccacacctttaaaaacttgctccagaacctggaatatattcttattagacactgacaccgacactttgcgtttcaaatcgagattcttactgtttacaaaaaagccgaatccggactcaagttcgattttgtgaagcacttcctctatggtacaatcgtttgccttcaatgtgatggaagtcttttgcgcatatccatcggacgcatatgccagtccgaatgagcagacaatgagtataaatagtaacttcatagatagtgatattttccttgaagaccgcctaagaaggtttaatcctccaagaaattggacgatacaataattttgcataaatttgtaacgagtttaattaaaaaactagtagttatacttgtcgggaaacaagtagattcacgattactgggctcaatacgggaagatacgaccaatatcatcccgtatcttttttagtttcaagggtctttgtttttcatggcaataagcttttttgaaataaggttattaataacactaaataaaaatttctatcttcatcttctctttacttccttgtacactgttcagataacgccagcgtattttcgaagaagcttctatataattcagtatctgctccaggctcctgctcgtgaatgtcccggagaacaggtcatcatcgggcacattgcgtcgaacgataaattccacatcatatctgtctgccaaaatctccagagcatcctgcaaagatgtctgcttaaagacgataataccatccttccatgccagttctccctcaccggaagtagtatagagctccgtttttccactctgcgaataatagatcagcttctgaccgggtgccatagtaatgtactgaggcttctgtgcggtattattaaattcgaaatgcactttcccttctatcagagtggtagtaatctcttcggaatccctatacgcctttacattgaactttgtgcccaacactttaatcgcagactgatgggctgtggaaacaatgaactgtttctccgggtctttctgaacttcgaaataggcctccccgtccagttccactttacgggtacgggaagcgaactgactgggaaaagtcagcgtactttttccgtttacccataccattgttccgtcagcaagcgtcacttgcgtacgttgtccggcaggcacatatacggtctgcatttctacattttccttttgcagagtttgtatcagtatataacttaatccgaaagccaaaacaaatatagccgcaatccgcatcgccttcatcgtaaaagtgcgtagtgaaagcagcttgtcacgccccgttttcaactcatccgcatcctgccaaacaagtgcatcataacttttgcggagtgacataaattctttgagattagcggcatcggcatcaatccatgctgcaacttcttctttctccctttgagaggcttttccggatatatattttaaaagtaaattctgattcatactataagttgagttactttataagtaataaacaggagtatatttgctccccctttcatatagaataccactcactaaaaataatccctagtgagaaatacaactttttttgctgttattaaaaaaagaggagaaaaagatattttcaagatcatcaaataaaaaatatcaggaaaggagcatactctttcagattatcacgcagcagcttcacagctttgcttatatgatactccactcctttgacactgatacccaattcttcagctatttctttatgagattttccatccagacgatcggatataaatgcaatgcgcgtcttttccggcataccagccaacaatgttttcacctttgagcgtaattcttcggacataacttccttcggatcacaggcttccaaggttgaaatacggatttccaattcccgttgtcccttatctgtcaggttttggtagacgttctcctgaacctgcaaatgtttcaggtaattgagtgacttgctacgtatataagtgattaatacagcttcgatactcggaatttcctgttttttacttaattcccacaaataaatgattgcttccgatacaatatcttcagctaccaaatcattatggacgtatgataaggtaaacaggaatgctctcctataataggtagtatatatcgaattaaaattaattgcagtcatttcgatctatattaatggcgcttatgcgtatagtttaagtatatccaaaggtctttaatgattgcaaagaaatatattttaattgaataaaagaactttttgaagagaaaatgggacataagccggtaaatcatcagaaggctgacgactagcatatagctttcactcctttctctccacttttttccaatgctaaaaactgaccaatttatgctaaaatcagatcattgcatcatttctatactattatgactcaaaattgctctaatctataaatccaacttcctatatttgcagccataacaattaaaacacaaaaagaatatgattacaagtagaaaggtttctcaggtcaatgtttttgctggtagtccctgggaagtagccagcgtaaagagtttattgaaagcagcgtatatcgaggcatcaatgaaagacaatggattgaacagtatactcatttctgttccatgcgaatattatacagcagcaatgcgtgtgattaataaaagaaaagtttcataggttttaggttaaacatataagattaaagccgggtacgatgggagatcgcactcggcttttcagtctttgtatgattcttttaaaacgaagtaacctttagattggttgactttctgtttgtttaatcttcagtttgctcaatttctactttttcattctttagcttttcaagagcggcaatctgcatattacagaaaaggtgtatgtgatgaatcaagttagtattctgtgacaagtaaacgacagagtccataagttgggcagacagttggtaggctttccgattatttgtattttcgtccggacgacgcatataaagggcaaaacttcggtataagataggaataaagcgttcccacggaagttctaagctaagcaacaaatggttcatattctccagcatacgttgaagagactcaaggtccggcttatcagattgcttgccatacacctctgcccatagacgggcttcttcttcaaaaaaaatttcattgggactttctttcgcgttagtcaaagcgttttcagtatccataagataaaagtttaataaaggggcaaaaaagaacggtttcgcctttcccgttgactaacacatcttaggacgctggaggtacattacatactccccacgggggtacgaaaccgcctatgaggaaagctacaagcaaaaaatgcctgcaacttatcaaaagcaggattccctgcgtcccattataaaatgttagtcactgcaaagatactatttttcaaatataagtatggaatatctgtagatttattaatcagaatttccacaatagcctccatagtaatttgacagcagttttgctctcatgccctaacaaactgtctgtatccctttattcatcgtagttttcggtgtggtagcaactgtggtggcaggtatgagagcaaacggttgctctcactctgtttcgtcctgactagtatcgtttctacattgctatcttttgatttacaggatgttaatatctgacatctcagctattaatgactgataccccatacattattagccaataaatgattcaatgcttctcctaaaagaactggtcaattgaaataactaacatggtcgagtcaatccaaacatacggtcaaagtgaatccaatcgacagatgtttcagaaagtttcaaacgcttgaactaatgattccaagctgttggaactaaagtttcaagcctttggaactatggtttcaagcctttggaactatggtttctcttcgctgaaactatagtttcaagacgaggaaactaatttagttgtcttatcctaaattgacattggaattacaggaataaaacgaagatactacaaaggttagagattggatttggaaaagtgagagcaagcatttgctctcatacctgctaccacagttgctaccacaccgaaaaccacgatgaataaagggatacagacagtttgttagagcatgagagcaaaagtgatgctaaattactattgagcaatccttgataattctctgcacaacaaaagtgcagaaatatgcataatactgcacttttgttgtgcaattatcgcatcattgcagataaatgcacttcagctatgaattgcttatacgaaaacttcaacaagttatttaaagagtacgagcacgaatatagcacccattcgatctatcccattttggtattttggaatgaattattagtaaactaagcaaaagcctttttcatcttttagtccacactatttttataaaaggcactaattttattgaattacctcactaacagagcgctagatttcaaaaagaaacttaactttgcacccgagttttatataaagagactgaattagtaactaaaaagattaaaccgcatgaaaattaagactttaatagcctgtttcatactagcttgtgctgcaacttcctgcatacaggatgaagcactgaactcagaagcagccattgatgcttgtacaggtgatgatgtacaattagcaaacatcaatgctgattcaaagctgatcaatgtatatgtaaacaagggagctgacttgtccaaacaaaagttagaatttgtaattccggaaggagccactataaaaataaatgatcaagttgttggagatacagaagccacatatgactttagtgaagagacacattcccggaaattcactgtcacatcagaagacggtcaatggaaacctgtttataccgtcaaggttgttttagcagaattacctacttctttcaactttgaagagttattaccttccaatgactacgatatcttttatgaattccagccgggcacttcacaagaaatatctaaagtattacaatggtcaagtggtaatccgggttttaaattgacaggtatggcaaactccaaaacagattacccaactgtacaggtagccaatggtttcagaggtaaaggagttaaattggaaactcgtgataccggtagttttggagcaatggtaaagatgtatattgctgccggtaacttatttatcggaacatttgaggtaggaaatgcattaacagatcctagaaaagccactaatttcggtttccagttctataaacgccctaaaacgctcaaaggacattataaatttaaagcaggagatgtatattccgtagaaggaaaaccacaagagggtgtaagagacaaatgtgatatttatgctgttatgtatgaagctgagaacaattctgtcatgcttaatggtgatgatgtatttacttcagataagttagtatcattagcgcgaattaaaccggaagatgttgttgaatcagatcaatggactgattttgaaattcctttcgaaccggtaaaaggacgagtaattgatgataccaaattaaagaatggaaaatacaaattaggtatagtgctttcgtccagtgtagacggtgcttattttaagggagcagtaggcagtacactgtatgtcgatgaagtagaacttatttgcgaagactaaaaaaacaagaaaatgaaaagatataaattactcaatattatagctgtactactattagtaagtacactttcagcgcaggcgcaagaagaaagaaatcaaggtatcatctggtcgtacttacacggatgggaatatggaatcaaggcaggtttcagtattggaggaacttctccattgcctctacctgaagaaattcgtaaaatagatagctatgcccctggtggcctcgccatttcaattgaaggaaacgcaactaaatggtttgacacgaaatggggaatgactgtaggggtacgacttgaaaacaagaatatgaccacagaagctacagtaaagaactatggaatgaagattatcaacaccaacggcggagagttacaaggcttatggaccggtggcgtaaagactaaagtcaaaaactcttatctgactatcccagtagttgccaactataaagtaagcaaacgttggaaagtctcagcaggtccgtatgtatcttatcttattgaaagaaatttctccggacatgtatatgaaggtcacttgcgtactccggatcagacaggttcgcgagtagattttactggtgaaagcattgctacttatgatttctctgacaatctgcgtaaattccaatggggattgcaattaggcggtgagtggagagcattcaaacatttaaatgtgtatgctgatttaacatggggattgaacgatatctttaagaaggattttgatacgatttcatttgctatgtatcctatttatttaaatgtaggattcgggtatgcattctaataaaaaacaatctttacattaatctcattatagctattaaaaaaggcgagaaactaaaagtttctcgccttttttaatcattgataaattattctcccataacttctagttcatcaagaattaaggtacttccgccagcacctttaaacaaatcaccttctttacttgaagaacaaacaatggccaatttatattttgctccttcttcataatctttcaaaaattcaaaaggtatttcgaagtaagtataatctactttagcagttttatcagataaagcagccacagcgacacgtttctctgaagtgttgatatcaaaaccagtcagaacttcatcatcagtatcaactttatataatacagcttgaatagcacactcatctatccgatccttaacctctacaatattattaacatctgtaccatcaataaacttctccccaggagtatacttataccatcccttgaaaacgactggttttttatcatataaaacaccaaatcttgtgcaatataatttcccctgttcaagaaaatccatatcgaatttaccagtaaatacagatcctgaagtaatcgccggaactaaagcattagctttagcacttgtatccatagtcactagctttatggcatactcaccttctttcttatcatctgtcttgtaaacaggcatagttgtaactcccataagtttcagcatggcagcgccctcagcactagttgcaagcacatctgtaggaagaggtttatcatattcattagcccaaagactacctggaacattttcccattcttcaaatgaaaacttcaaaacacttgtcttagcagcgatagaaacagtatattgattagtagttccatcttcagcaacaactgtataaacaacatttcctgcaaaattttgagctacaccagagccgggagtaacagttgctttatcagaaactgtaatagtaggagctaaagttttcagttcttcaggagtagcatcctcactaaccttaaatgttatagttttattctcctcatcaatcactggttggcttgttaccaattcactatcaaaggtaaaactggttattttagcttctacactttcattaccagataatctactacccctataattaactttcactttcattcctccgccagctacatcaacattaataaccatatcaatggttccattaccgatcgtacctgaaacagaagtattacatgaaccaacaaccaattctaaagtttgacttcctgaaaactggaaagcttcaccatcctgttttaaagcgcaattatccacagcaatatcaccgatagtaatatcagtacctgctacatttataacaaaattctttaattccaacttaattgcagtatcagaagcttttgatatataaactttctgaaccatatcagaagcaataggagtacttacacctacataatatacatccatctttcctttatatgcaccagctaactcactatcaacagggtatttaacatcatcgtcatcaccacaacttgaaaacaagctgactgaacaaacaaacataaacaaatacaacaaactctttttcataattctcttatttagttaataatctatttgatcgcaaaatcgggtacaaagtaacatatttatattaattatcacaaggtccattctttgtattttatgatctatttttaagatcatattgcaaaaaagctgtttttatctactttttaaggttcatatttacagcatactcaacaaatatatacccaaaaaggagggatttcaagtcccccctttttcgatattcaagatattatagttttcaaattttcatataactaacctattattctagctatacatctcattactcgccaataacctccaattcatcaacgatcagcgtactgttagctgcgcctttgaacttatcaccttccttactggaagaacatataatggctaacttatactctttagtactatcataagatttctccggcaaatactcaaatgcaagttcaaatgtagtccattcatctttatccgtaccatctttcaagcgagcttctgccacacgatattctgaagtattaatatctactcctgtgagtgtcacatctttgccggctgcatcttttgcctcgtacaataccgcagcaatagaacattcgtcgataatgttaagcccctcctgcgctggtttgacagaaccatctatatagttcgttcctgctttatatttatatacgccttttaataatttaggctccttgtcataagcaataccaaatttggttgatttcaaaggagcaagcatattaagactgaacgtacccgtaaataaagagccggaagtgataggtgccatactgcctaaagcatgtgctctagaatccaatgtcaccaatttggcagccttaccactaaatccttcagattcttccatcacaggatagcctacttttactgccgaagatgatccattcaacattttggcaccaccattggaagtagccaggaatcctgcaggctccggagtccaataattttcataactattacctgcatcaaattcagaccattcatccaaagaatatttcatgatattctgaacaccttcaatagaagcagtatactttcttgatgttccatcttcagcaactacagtataaacaacactttttcctccggagaagtcctgagcaacaccacttgccggagttacggtagccttttctgaaacagcaatgactggtaccaaggctttcaagtcttcctcagtagcctcatcattaactttaaacgtaatggcactctttgcatcatcaataaccggtgctactgttataacttcgtcatcaatagtaaaatcggttattttagcctccgtgttttcacttcctgacagtttagtacctttataattgaccttaactttcattccgccttctacatctacatcaataaccatatctacagcattcttaccaactgtacccaaaacggatgtattgcatgatcccacaacaagacttaatgtctgattgccggagaacttataagcatcaccactttttgccaaagcacaattatccacagtaatgtcaccaataagaagctcagcacctgctacggtaatagtaaagtttctcagttccagttttacagcagtatccgaagcctttgagatataaaccttctgaaccatatcagaaacaataggagtagatactcccacataatatacatccatcgttcctttatatgcacctgcaagttcactgtcaaccggatatttcacatcgtcatcgtcactacaactcataaatagactcaccgaactaataagcataaacaaatacaacaatcttttcttcataatcttcatagttaattataaattcttttttatcacataaaatcacgcaaagtaaaagatttaaaacaactaccacaagtgccattcttggcattctatgttccatttttaatgtattatttatacaccccccaaaaacaagaaaaatagaagtcccaatattaatattcaaattataaacgagaagagtaagcagatatatagccctgcactaaaccaatcatcttttcatacaaaatcctatcacaatccatatacctataaatctcacatttatcaacgacagacaatttttccgatttaatatccgctcaacagcctcccccttacgaatgacagaagtgaatttacgacattataattattgcatatttattaaaaaagccatatctttgcagtcttagtcataattgaaagtttgtcaaagtacaaagttagacatgtttaatattgaaattattacaaatgtcgtttcgttgtgatggcggaaccatttgaaattactactgatttaatatcattttactcagaatattcactcgtgacgatgcgatattctttcttaatctataaatatatatatttgcaaatgttgacagcccataatgggcagttagcgtcgtttgtatgcgtgatgtcttacgtgtttaaatttagtattgcttatatacatgtttataatgatgaaaaaagccctggaccgtgatggttcggggcttttcttgtacttgcaataagcaagaaggaaaaagatttcagattacatcggtaactgtgctattatctctttcgaacataccggcaatttgccattctttcccatgttcacaaaaaccgttgcacacaacaccgtccattggtcaccatatgtcatcgtactgctatggttatacccaaggcaatgcccgtattcatgaaacatggcctgacggggataattatgcggatgggcatccggaggagtcgcatcaaaataaacaccggtataacaataattagccaagccgtatgtattgcctccacctaatccgccgacaccggcaacacaacccagcacaagcccgccatgattacggattctttgacgcaacgcatccagattgatcggatttcctccattgtctttcaacaaaccttcgtatttgttcatttccatattaaactcttcggaagagaacatgaaagccatattgacagccaacgccactccatgacggcacaataacggattcatatgacgccaatacgcatggccattgtcagccgaataagaagaaaaacgtataaaccaacgactgtctatctgttctattttcttcataaacgggtcttctgtacgaataacaagcgtcacatcgtcattggaaagtccgggctgtgcaggcaccactatctttcgtccactacttgtagtgaatgtccgttccgaatctacaaccggcaaggggaatgacgcttccataaacggataaatctgctcgaaatgtgccagttcgaagaactccatgctaaatttattaaaacggcacataatcttcacatcctgaatacctacaggagaaaagaacttgacaagcaactgatgttcgtctgaaatggaaacctgcaacggagcattcgcataaaaagaacgacggcgactgtcataaaagacctcacgtggctcactggccaaaaacatcgtatccgcgcgaaaccgaaagaagtcctctttgcgaacataaagtgaaccatcctgattttccggatgcagataatcaatactaatatgagatacacggcctgcctcaatcttacaatccgtgaaacggtatttacggacaaactgagttccgtcactgcgatctgactcaatcgtcacaaatccggataatgcttttgtgccgggcaatgagtaaaacgagtatttcccggtaatgtcataagattctatctttttggttccggaatatttcccgtctgcaccaagagcggcatatattccttcggcatcgtcgaaagttacatcgattttacgaatgaatctccacatataatcggacgatacattcaaatcgacatccactctccctacagaacgctccaagaccactgtatgcgacaccgaagcctgatctctgccgatatgcaattctattttcttataaaagtaaaccgcatctaacggcgcattttccgcatgatttatcaaccagtcatcggacagtttttcgggttctttgacagcctcatcttcttcctcgctcgtagtagccagaaaaacgactgtataatcccccatactcaatccttcgatagtcaattttgagaagttttcttccagcttctgatataagggcttaataatctctccacgttcattggcaatagcataccacatacgagtgatctgctccggtttgcttccgcgtgtctgcaccacggacgcatcgtcttgctgcaacccaaacaaaaacgacacttgtccggaatgggaaggaacaatgccggtctcctgttcaaaatcgcccgaacagttggtaagcaataatgcgcccagtaatatcattatgattcttagcatcttcataaacagcctcctctatttctttacacaacgtacggatgcaaatgcttccatctgtaaccgctgtttcttaataacggctgtctcggctccttcgaacggcaaccagtaagcccatgcataaccgcccggaagaccgttacgttcgtttgtccacaacacagctcttttcccgaaagccggattattggatgatgacttatctcccttcgagccagccaaaggaataataaggctgcgaccggtgtcttccgaagtaaacttcacataatgctgtgttcccgtcacaccactggacggagttatcagtgttccttctccgatgtgaagtgtagcggcaattgtttctccatttcctgccttatatctacccggaatctcttggtctgcaggaagcagagactgccattcgttaccagtcggtatccggtatccttcagggcaaggcatatgtgtatcattcacccaaggtgcatcagctgtctggttacctaaattgttggaaggattatacccctgccaaggcacgtacatatataaacgtccaaactggaacagaccacccaccgtgtttatccaactcttatgatacatgtcttcgaccgtagccccgtccaacggataaatctgatcttccagatcacggctacgcgcattaaatgccatccatacatttcctgcgatttccactgtttcaatctgtttgtcactcggagccacacgtatctccacgtaatcatatgttccattcaacaaggcattttttaaatgtaccaaaaccgtatagcccaagcgaccgctgccttgcgctgcaaccgatacattaaatgccgacacgataccttccgcctcttccgacacggacatattgcctacacttgttccgctaccggcaccttctgtagaagaaatatcgatacgagtgtctgtaacgaacgccagcgtcatgtcatcagcacctgtagcaggcacttccagtatattattctcatagtctaccttcaccccttccggaatcctggatttcgacgcattaagcaaaagacgttggttcgtatcaggctttccgacaatagtttccccttcttcccacggtttgatctcaaaaacgcctgtcacttcagctcccacattgagcactgccaattcatatactttattgcgttcgacaactggtaattcgacttttaacctgatagggacttcaccataggttccacgcaagatgatattgacaggacgtgtgctctcgaacagacggaataccccctcttgcttgccatcgaatgcagaagagaactccttccgatagctcaccgttttatccgacgcccggacattttcgaggaatggtaaagtctcggcaggagcattctctacgatgacttcctttatctgcgttttgctgtcggctgttgtgttcaaatcaatgcgcgccacaccgcgtttcataattacattgacctccgcattgctgcgtgtcactactccgctctccaattcgactacagccgccatgaaatccggcgcagaattatcatgcaatccttcaccgataatcgtattacgaaattcttcttcacttttagctttctctccggcaggaatctccagtccggtcagaaaataaagtcgagatccgctgaccgcagaaatctccgactgtccgccttgcccgggagtcagctgttcctctttatataaattcccgtcactaaactggaaaaccgatacatctttgagctcttcagaagattcttctcctgctaccgtaattccttttaataccactgaataagtttgttgatggccttttcccccggttggttcatcgttcgagcaggcgcctgaaagtaatgttcctattataataggaacgatggtttttctgcaagaataattcatgtttttttgattaaaataatactgaatattggaaactttataaatgcattttccaaaagcggcggcaaaaatactacttttttcaatacagcaagtcatctgcataaaattttaataaatatgttgaataaaagaaatctttaacgtcagactaactaaatacaaaataaaaagttatttttgcaaacgttttttaattttatctcattctaatattatgtacaagatttttcacggcttccacctagtagaagcttatcaggacttaaagaaagctaaacggttagcaaagaatcagacagtggcccgatgtataaagttaaccatagctattaccctctctcttattttatggttccttcccattgatacttttggaatagaagggttgaccgttatagaacaaagacttatttccattttcattttcgccacactcatgtgggtgttcgaagctgtcccggcatggaccacttccgttcttattgttgtactattattacttaccgtttccgacagtagtttatggttcttaacccaaaatactcctgcggaggaattgggacagacagtcaaatataagtctatcctgcattgctttgccgatcctatcatcatgctgtttataggtggatttattcttgccatcgcagcaaccaaaagtggactggatgtattgttggcacgagttatgctgagacctttcggaacacaatcacgatatgtgctattgggattcatcctcgttacagctgtcttttccatgtttcttagtaatacggctacggcggccatgatgcttaccttccttactcccgtattaaaagcactcccggcagatggaaaagggaaaatcggattggctatggccattcccgttgctgccaatgtaggtggtatgggaactcctatcggtacaccacctaacgccattgctttaaagtatttgaatgatccggaaggattaaatctgaatatcggttttggagaatggatgagctttatgttgccttacactattattgtactgtttatagcctggtttatcctcttacgactgtttccattcaaacaaaagagcatcgaactgcaaattgaaggtgaagcaaagaaagactggcgctccattgtggtttatatcacctttgctataacggttctattgtggatgttcgacaaatttacaggagtaaactccaatgtagtggcaatgattccggtagctgttttttgtataacaggcgttattaccaaacgtgacctggaagagatcagctggagtgtactctggatggtagccggcggcttcgcattgggcgtagccttgcaagagaccggactggcaaagcatatgattgaagccatcccattcagcacatggccccctgtactgatgattgtcggttccggactgatttgctatgctatggccaactttatttcacacacagccactgcagcattactcgtccctattctcgccattgccggaatcagcatgcgtgaaaacctgtcatcgttgggaggtgtagagactttattaattggagtcgccatcggatcatcgctggcaatgatattaccaattagtacaccacctaatgccctggcacatgccacaggaatgattcagcaaaaagatatggaaaaggtaggtattattatgggaattataggacttatcttgggatatacaatgctgatcatactcggctccaacaagttattataaataatctatttaaaaaagaagatgtcaaaagcaggatgatacatttatcttgcttttgacatcttcttcttttcaaatttagcgtcctataatcctctccaaaagtttataagaaacaacaatggtataaaacgatatctcgcctactctattcctgatccgaattcacaaacttacttggactgacattataatacttcttaaatacctccctgaaatacttcgcatccgaaaacccgacaatttcagcaatctccgttattgtatattctttctgctttaataattgtgctgcacgttgcaaacggatcatccggatgtagtcagccggagcataaccggtcagcgctttcagtttattatagaaacttgttcgactcatatgatgctgattactgagtacatctaccccaaagtccaaatctcccatattcttctctatacattccttgactgaagctatgaatttccagtccaaagtattagtacaattgacaggtaaatgcttttctttattttcgatactattatagacctgacggagcaattcacgatttgccaatatgtttttaatagtaacctttagtatacccacactgaatggcttggttatataggcatctgctccgatttccagtcctccgagtatatttttctcatcccctaacgcagtcagcaatatgactggaatgtgagacatttccacactcgttttgatagctgagcacagttcgtctccactcatctcaggcatcattatatcggatataacaagatctggattaaactcctttataatgacaagcgcatctttgccattggaacaggactggatattataccctgccataagcatatccacaagataattacgcaaatcatcattatcttccactaccagaatacgctgtaaagaggtttttatctgaggtgcctccaagaccggcaagtcagaagttccccccagtacaacagcatccatacgttcattcggcgtttttggagagataaactttgctttatgcaaatgggtatttcccttcgggaaagtaatttgcacgcatgttccctgatgttcaacactttgaatatggatctttcctttatgcaacttaaccagtttatataccagcatcaatccaatcccacttccggtcactttcaaattgactacattactaccccggaaacaatttctgaataatttcttctgttcagatgaaggaataccaattcctgtatcctttacctcaatactccaagtattcccttcctcgcaagcacaaatacacacgctaccattctctggcgtgtacttcaacgcatttgacaaaatattcttcaagatagaccccattttgtcactatcaaaccacacattcaaataatcaaaattactctcataaacaaatctgacacgcttcatctcagcatatttgcggaaagtagcacaaacatcattcatataagaattcaattcatactcagaaacataaagagtagacgaatatacgtcgatccgttcaaagtttatcaagttggttgtcagctgaagcaatgtattcacattctttagggccatattcatatggggtaatgccttctctgccaccatatggttttcaacaacttcttccagcggtgcttttatcaatgtcagcggcgtacgtatatcatgagcagtattaataaaaaaacgtgtcttctcatcagaaatcttcttttgtttatgcaacatgataacacggaatatgataatcataatcaagaccaccagaattgcataccccaccattgcccacatactggcccacaccggaggggtaataatgatctgaatactccttgtttcataagttttatacttctcctcattagatacagtacgaatttgtaacgtataactgccaggaggcagatttctaacaacaatccgattatcttgactcggacgggtccactctttatgataaccgtcgattttccatgaataaagaatattagaaggataatcataatttatggaagccacatcaagcgaaaaagtattttgaccgtaggccaattccagacaatcagtctcgttaatatccttcttcaagggagatccgtcatcaccaggatagacaggatgataagctatcataaaatcccgtaataacaaacgcgaataatatggctcaggtatttctatgtctgtcggaaacttaacagcaccatcattgccaccaaagacaagcgtactgttactgtaagttgtggcagaaccggcattaaaatttacgctcatcagtccctgctcccgtgtccagttacggaaaaaatgatctttaggtgaataaatcgtaataccattttccgtacccatcaggagattttcatcctgacgcggaataatcgtataaatattatcagaaatcagtgcacaattatcagttcggtactgatgaataaacttctttttattgatatcataaacaagaagacctgctccacgagtaccaatatacaggataccatcttctctctggtataatgcacatatataaggagattcaacaggcaagtcaatataccggtaaacaccggattgcttgtcaagctgatagagtcccattcttgtaccaatccacatttgacgggcatttttctccagaatggtggtgatggaacttactcccggatacaaacgaacatttttagtctcaagattaatgcgtttcaaatgataatatccaccggaccatacatcaccgcccgaatcctttttaatgtcataaatgtattggtcaggacgtattcctgcaatggccgcaggcgaaagatagcttattttaaaccctttcttcttttctatcttataaattccagacgtaaaaccaccagcccatatcacaccaggagagacttcacacaacgccaagaagatatgattctcatcatccggcaccggatcaaaagaactaaaaaaagaacaccattctcttgtatcggtctgataaaaactaattccattactagttgcaaaccaaaggtcaccgtcactatcttctatcacatcatgcacctgatcattcactaacgaccggttattgccaagagaatgctttatcaaatcatatcttccataacgattgttacgaatggtaataccagtaggataattggcaagccaaatacgctcctcctcatccacatagatatcattgatattgtttccgttcattccattataactgctatagtcagccgttatataaggttcactcttacaagtatttacattcagcttatatactccttttccacccgtagctatcaacaactcatcagcgttcagagcaacaatctgattaacttccacattgtttggtgcataacaaggagtgattttttgggttttaccaatatcatatataagtatcccttctttataactacccacaaataattgctttgacacagtatggtaatacagttcgtgaacaggtgtaacgatgctttttactacttcatcaggaatttgtttcagttctcccttttctatcccgacacaaaacaaaccgcttcccgtaccgataaaaaaatgaccgccatcagcctgctcaatagtagatattgcaccatcgacaggctttggcatatgttgtgttgttccagtacgaatattataccaggtaattgtatctttgtaacatagccaaatatgatcattcttgtccagataaccataatcaagaaatgcttgaaacttatttcggatcaattcagggtgtacataagccaattcaaatttatcatgttgtgaatcatacctgaaaatacgtcctttctgcccgattacccataatacatcttcctgatccatataaagccagttcaaagctatccgtgagtccagcttcatactgtcatccgagaaagtataatgcttgatgtgtttaccgtcataacgatctaccccctcctgagtcaaaaaccacatatatccgcgtcggtctttttgaatatggtagattttctggttgttcaaaccgtcttccaaccctatgtacttataaatttgccccttgctcacagcactactaatgagaagaactataaacactaaaagttttctattttttacaattatcttcattcctttcacaaaacactcaaaaatatatttgcaaaaatatgaaaatattatttaaacagcaactgaataaattaataattatatgttaaaaacagaaacataaaaaacacaactatctcatctatcggaaataccgcataataccccaaatactccccaacaaaaacatcggaaatagataagtgttctttctaaattatattagtcattttttgtacgattttccagcatcagatcataaatatacacgaacaggaatcatcttattattaggacaatttcaatcatatatttattccttcgattatgcatttaaaatccataagcctcttttcaattttccataaaataaaaaatgatgttaattccattttgaaacttcgaactattttttttaatcccgtgtttttttcatacagtaggagcttaagtacatttcggatgatataacaaaagtaatataataaatcggggaagtgtaatagaggaaacctacatatttttctaaaaaaatgagttttaaatattgtttcatcaataaaatctacagccatgaaaagtataagttcaaatttatggatcagattaatagtcagttctatcataggaacaataatttattgtttatcaagtatgagacagcaaacaagctgactgtaaagaagaatattctagcgatatgaataaatatttttccattcaacaagcaaaatatttttcctttataaaatactaattatatatctatatatttacatataaacccactaataagtatgtgactttaagaacttaacttacatacagtttcttacttattaccaaactctatttttaactatctaaaaccaacttaattatggaaaatagaacttctgatttatggctcggtcttggtataggatcggtcattggcgccctcgtttatcgtttttcacgaacttctaaagccaaaaaactaaagaaaaaagtatgtgatgcctttcataaaataagtgggcaagccgaagaaatgttagatactgcaaaggaaaaagtattggatacgggtgctgccgtagccgataaagttgcagacaaaactttcgacctagctgaaaaggcagatgaccttaaaggcaaaatgcatacaatagctgctgatgcaaaaaaatgaaacagattctagtaaaccaattaagaacactagagtgtttctgaataaacctaaattattaactaaaacttttgaattatgaacaagaaaactgaaaagaaacaggaagaggcaaagggcactaaaaagaccgcccaagctaaagagtgcaagtcttcgacttcaagcaaaaaaactgaaaagaaataggcattcagaatcgttaagtttgtgtcattcttcaggcagacaggaatctgcctgaagaatccaccaatttattctcaaagtgactttacaattttaatttaaaagaatatgaaaaaattattatttgcgatttttgtagttacaactataatatccttcacgtcctgtcgtaataaaaaagaacaggataaagcgaaacaacaagttgaaaaagtgaaagaaaacgtcaatgatgcagtggacaaagtatccgataaaatcgaagatggtgctgatgccgtaaaagatgcatggaaagacaccaaaaaagacgttcaaaacaacgcagagaaaaccaagaaagaaatcaaggaaggatataacgaagtgaaaaaagatgtaagtaaaaaacttgactgattcttaatcgtatatcattctataaatagtaacttcttacatattaataagctatggttggatttgcaatatggattgttggattagtactgactatcaaagccgcactggaaatatggcgtatccatgcaccaatagaaagacggctgatagctattatcttaatcgttcttaccagctggataggattgctgttctattatttctacggcaaggcacgaatgccgcaatggctgggtactggagttcaaaaatattagctacatcagaaagcaatatttatatgaatataattctaaacatgggagagtacagcaaaagtcaatagcaactctcccaaaatttccctccttcaagaaggagatttgagttactattgacttttactctctgcaaattaccaatatttttcaattctctcataaccgaaaatcctaccgcgttcatcatctataccttgcaacttcttgcagataatctgtgctccaatcatactaaaggttatgccgttgccaccatatcccaaatcaaaaaacatcctgtccttatctggacaattaccgataaagggtaacccatcttttgttgtactaaaagtgccacaccacgccatttctgttttaaaaggaatacttggaaataatctcctaaatttcttttctaatacaagagttttctttctgagtaacgcatcacggcgctccggatcactgaacttttcatcttcaccaccgacaatgatacgatttccccttgtagtccgtatatacaaatatggctcagctgtttcccaaattaaacactgttcaggccacaaatctttagaatctaccggatgcgacacaagtgcataagttgaagtcaaatccataatttcccgagataaaaacttccctgcttcaaatccggctgcgatgatcacatatttacactctattttatgccctctatctgtttctataatatatccttcaggcatttcaacacattctgttacaccggtatgagtaaaaatttccagtccatcttttttcatatggtagagcaaaagaccagtagccgctttgtaagcatccatctgtgccgatactcggtttaacagtgcattgcctgaaacctctatattatacagtttttttatctcctctttttccagcagacgaaccggcaaattgtgcttctttcgtatcacatattctttttcaattaattctatatcctttggaatactagcataaaaaagacttggtcgtttttcaaaatcagcatctactcctgtttcctttaataccttttcaatatcagcaattgatgccaaagatgcgcgatatgcagaaacagcattatcctctccaataatttctgccatttcacaaagaggaacatcaatttcatattgcagtaaagcggtacttgcaatggaacttccagttgcaatgcttcgtttgtcaaccatgcaacatcttaaaccggcactacaaagctcgtgtaccatcaaagcacccgttataccagaccccacaactacaatatctgttgaaaaaccatcctccaagggatgaaagtaatctaacaatgaatttttaacaacccaatagggcaatcctgaatgtaagtccataatatattgaattatgcaaactccctttcatcctcctccacacttacagcggggagaaaaacgtaaaaacatggaaaacacaaaagcattcccaaaagagtttactcccgatttataataagatactattcaccctgttcaattgcgcaatatcttttacattgtatcaaaacgttctcaaaataaacaacatcacacaaaaaaagatagttcgaaggaaaagactggatttaacatctatttaatgcacaagaaatattgtaaaacaaccagcatatatgaaggtattcaccaaacaaaatatcaacatactatctaaataatatatcaaggtatgaaattaaatctcagtagccccatcatatacttttttaacattaaaaataaattcaatgacaataattatcaaatatattcggtgaggttgtaattgcccctttatcagcagggcatatggcggtagaaacacacaaaaagctccgtaaatcaatgatttacagagcttttaatcaggaatactcgtactcgaagcgggacttgaacccgcacagccgcgatggccaaaggattttaagtccttcgtgtctaccattccaccattcgagcatcctttcaaagagagcggaaaacgagactcgaactcgcgaccctaaccttggcaaggttatgctctaccaactgagctatttccgcattttttcaacgggtgcaaagataatgagtttccttgtttctgccaaactttcgatcaaaaaagtttggcagaaaatattttatcgccctaataatgctttctcagcctgctccattccacagaaattgaagccatcgaccacttgttgcattaatgcggagatttcatcattacaaagattaccgatacttccttcgtgtgtatgatgcacctgtttgtcatgagtaaattttccggcttctatatcaagacctactttcttatacgcatcacggaaaggcataccttcacgagccagtcgattcacttcctcgacactgaaaataaacagatatttatcatcatcaaggatatgttcattcaccttaatctcattcatgatataagtcgtcatctgcaagcagtccttcagttcctgaaaagcgggaaggaaaacctctttaataatctgtaagtcacggaagtaaccggatggcagattgtttgctatcatcattatctgctgaggaagagactgcagtttattacatttagcacgtgtcagttcgaacacatccggattcttcttatgaggcatgatgctcgaaccggtagtacaatcatccggcagcttcacgaaaccgaagttctgactattgaacatacaagcatcaaaagccagcttggagatcgttccggcaatggtagccaatgcaaaagcaacattacgctccaacttgccacgtcccatctgcgcataaacgacattataattcagcgaatcaaaacctaacaaatcggttgtcatcgtccggttcaacgggaaagaggagccatatcctgctgcagagcccaaaggattgcgattgcacatcctgaaagccgcttgtaggaactgcatatcatccaccaggctttcggcataagcaccgaaccacaatccaaaggatgaaggcatcgcaatctgcaaatgggtatatcccggcatcaggacatttttatatcgctcactctgaagaatcaacacatgaaagagttgttccaccgcttccgcgatctcgcgaatctgtgtacgggtaaagagtttgaggtccagcaaaacctgatcattccgtgaacgaccactgtgaatcttcttaccgacatctcccaaacggcgggtcagcatcaattctacctgcgaatgcacatcctctactccttcttctattataaactcacctctttcgaccgaagcataaatagtcttcaactcagccaacaactgttccagttcttccttggtcaacagaccgatactttcgagcatcgtaatatgagccatagaaccgagtacatcatgtttagccagataaagatccatctcacgatcacgtcccaccgtaaaacgttcgatgtctttatttacctgcacggatttttcccaaagtttctgcgccataatatttaagtattaggtaataagtagtaagtaataatcgtagttacgttgatactccgcgggtattacctattatttattacttattacctgtttaatagttaatcatcgacagcatctcaaccatcttctccagaccatcctgaagaggtttctgtaccatcgctttcataaacggattgatatccatactgatagtcactttcaacttgcactcttcctctgttgttgagactagctgaatccacatattaaaaggtagcggagagttggtagttgccagtttaatacatttgcaaggttcacgctcaacaatctgcaacgtcagctgaccgataggcgaaacgctaaagctcagtgtatccgaatcaaaactcaagtcctgtattttatcttccggcaaacggtcttttaccgattccagattgctcaagtccgatagcttggcatacacacgttcctgactgtaaggtattacctttacactactttcaaaattagccataattctttattcgtataaaatcaaagaaagaactatccgaacaggtattgtccgaatggttctttcttactaaaatttccgatcaaataatacaatattatttccctgcatcccaatgagccgggtctttacgccaatcgttcaatgtcgcaatatcttcttcttcgatataaccggtacgaagtgctacatcaagcactgcttcgtaattggtcaacgtcaccaaaggtactttagcattcttgaatgcttcctcggcaacgggaaaaccatacgtataggcagctaccataccgatcacttcacaaccatcgcgacgaattgcttccacagccttcaaactactaccacctgtagaaatcaaatcttcaaccactacgactttcatacccggacgaagttctccttcaatcaggttttccaatccgtgatctttcggggtagaacgaacatacacgaacggcagattcaacgcgtcagccaccaatgctccctgcgggatagcacctgtagccacacctgcaatcgcatccacctgtccgaatcgttccaatatcagacgtgtaatctcaatcttcacaaaattacgaagagaaggataggacagagttttacggttgtcacagtaaaagggggatttccatccagaagcccatgtaaaagggttagcgggttgaagtttaatagccttaatcttcaaaagtttctccgcaaatagtctctctaagtttttcataactaaactaactattaattatttgccgcaaaagtacagaaattgaacgagaatagaaagaagaatccgtttattttttaactgaattgttcctcttcctccggaatttcgatacaacgacgtatatctttgagttcaaaaccacggctcaccgcaaatcgcatcagttttccgttcagttcataatcatctttcgcatgaatgcttttccgtttggaagccagcaagtcacgcaggatggagagatattcctcttcatcaatttcattcagatgacgccatgccacatcggaaggaatcttcttcatgtagagtccctgtgcgattttcatcttaccccatttggcaaaacgaaacttatcgttcacaaaagcacggcaatagcgctcgtcatcaatatacttttcggtttccagccgttcaaggatacgcgctatggtctcataggctattccccaacgctgtaatttctcatttacttctgcccggcaatgttctgcagcggagcaataagaggcaacacgattcaacgcctcttcatctgttaattgtgcactcatcggttagctgtaagtattctatcttttccaaatatgtcttttataacacgaacgtcccgatattggttcatttctatcatgcgtatcatgtcttgtccgtatgcctgattgatttcaaaatagagtttgccacccggacgaagtagttctcgtcccagttccgcaatccggcgatagaaacgcagagggtcttcatcaggaacaaacagggcaagttccggctcccagtcaagcacattggcttccatctctgttttttcagtttccgtcacatagggcggattgctgacaattatatcgtaagatgccccctgtattccgtcagcagaaaaaacatcctgtcgacggaaggtgacctgagcatccaactcttcattatttttacgggcaatagccaacgcttcttccgaaatatcccaggcatccactttcgcatccggcagatttttatccagagagatggcgatgcatccgcttcccgtacctatatctaataggcgacgggcatccggattctccttcacaatcaggcccaccagttcggccgtctccggacgagggatcagcacgccgggagctacccggaagttccttccacagaactcagcatatccccgtatgtactgtattggctcatttttctgcaaacggaatataatgttttctaattcacgctgtttgcatgcagataaaattatatctttgcccatgtaaatatcaagcgcatccacccccaacatgtcgcaacagatcaacatcgaaagggctttgacctcttccggtggataaatatcctgcaatgactgacggatgtaagtagtgatacggttcatattttacgatttcggagtgcaaaagtaagaataatatagcgaagagcaccaaaatggaagaagaaaaatacatgagacgttgcattgagctggcaaaaaacggactgtgcaatgttgctccgaacccgatggtaggagccgttatcgtatgtgacggacgtattatcggcgaaggatatcacatccgctgcggagaggcgcatgccgaagtaaacgcgattcgttccgtcaaagacaagtctttattgagccgttccaccatttatgtcagcctggaaccttgctcacactacggaaagacgcctccttgtgccgacttgattatcgaggaaaagattccccgtattgtaatcggctgtcaggacccgttctcacaggtcgccggacgagggattcagaagttgcggaacgccggaagagaagtgacagtaggcgtactggagaaggaatgcaaacatctgatccggcgctttattactttcaatacgctgcaccgcccctttatcacactaaaatgggcagaatcggctgatcatttcattgacgtagaacgaacagacggcaatcccgtaatactgtcctcccctcttacttccatgcttgtacataaaaagagagcggaggctgatgcaatcatggtaggcaggcgaacagcattgttggacaatccgtcgctgacagtccgcaactggtacggccggaatccggtacgcatcgttttggactgtgccctgtctcttccccacagcctgcgtctgtttgacggagaagtatccaccatcgtatttacagcagaaaaacatccggacaagaagaacgtcacatatcgcacgattgacttcacacaggacattctgccacagatcatggaagtgctatatcaacaaaaaatacagtccctactggtagagggagggagtcagttgctccaatcattcatcgatgccgaactatgggacgaagtatatattgagaaatgtccgtgcaagctgaattccggtgttaaagcacctgaaataagcgataattttagttattcgacagaagaacacttcgacagacagatttggcattatgttttcgagaaatagctaaaatagttctattcaaggggttctacgtcgataaaaacagcgttattatctataattttatataaaacttccccttaatgttctatatcggaaaaaatgttcctatttttgcaacttgtaaataaacacaatctttcaaatgagaataaagtttttatcaatcattgcgagttttttcatggtgtcattcgttattacgtcttgccttgacaatgataacgaagtcaattatagtccggatgcgactatacgcgcatttgaacttgacactataggttatggggtaaactataaattcacaattgaccaagttagtcgtttaatatataatgtggattcgctgcctgtcaatgctgacacgatcattaatagtattctgatcaagacgctgacaacagcatccggtatcgtgacgatgaaagatcagaacgatcaggattcaatcgttaatattaatgactctattgacctgactaagtatgtaaatgcaaccgagaaaaacaactttctggtactgaaggtatgggcaccgaatatggaggttcagaatgagtacaaagttaatatacggatgcatacgatggttcccgattcactcagttggggaaaagagccgatagcgaataatcctatgagcaacactactgaaaaacaaaagatagtaacgcttggggataagatattactattcactcaaaacagtgatgatatttatagcacagcaataccggcaggctctcctactgatcgtttaaactatggtcaaaaatgggataaagaaacgacaggaaaacttcctgttggtgctgatattacatccattatccgattcgttgacaagttatatttacttgctgagaataaggaagtatataattccaatgacggtttgacttggacaaaagatgaagtactcaattccgatggtgtttccgttactaatctgataaccagcttttctgacagtgatggcagtaaccataaaaagataaatggaatagcaggtatagtagagattaatggagagaaatatttcagttttgcagagaaagatgcaacatgggagaaagatatagacaaattaacagctgtccctgctgagttcccgataaacaatctgtcagccgatgtatatgcaactgaaagcggaacgttgaatgcaatcgttgtgggtaatactaaagacggtttagacaatgacacagctacggtcgtttgggcctcagaagatggtaaatcctggattccaatggagattccatcaaataataactgtccgaaattagtagacccgtctattatacattataatgacgcattctacatttgcggaaaagagacaaaagatgatgctaagggattccagaaattctatacctccccgacattacttgtatggaaaggggtagacagaat

SEQ ID NO: 4591 - DNA, 6780 bp, Unknown
  gut microbiota DNA sequence
tttattagaaagagggacatttactgaatatccctaagaaatatcgattcgaatattatatacaatcataaataaagaaaccgctgtaagtaatcttttacagcggtttactttttagtaattttcttatcagaatttatatcctaatacaatagaaaagtttgtatttttaggattacctattttttctacatctactaaaccaaattgaccatccaatcctacaataaccttacctaattccaaagctactccaacaccaagaccggcatcaaaacgttttaaagcatcatcaccaaatgtatcatacttacgttccgtatcattccccaaatcaattttggttttaccagcaataccacatgccaaataaggaccagcattaaccacaatatttgtattatccgcaacattaaaacgagcagcagccataactggtaattccaaatacattgcatttatgctattaccatccttttttgctcctttagtcgacaaaaacaatgatggctgtaatgaccaagtattatcaaaagcatattcaaaaccacctccaagtttaaagccaatctttgcattcaaatcagcatcacctgtataattactaatgttcattcctaccttagcattccaacctgtaatctgtgaaaagccagcaactgaaatcagcgcaaataaaataaataaagcactctttttcataattctaaagttttaattaatactatagttaaatcatctgtttaattaacaatgcaaatatatgattgatatatatatcaaacaactttttcgttaacaaacgtgtaaaatatagagattacacacaaagaaagggaattccctatttcagagaatcccctttcctattttttattatctactacccgattagaaattgtagtggaaaccaatagacaaatcttcgctagtcaacatcagaccgaaagaatctccggaagtgttcacattcttacgatatcccaagaaaccatacttggcgataaaagagaaatgatcgttcagtttaacagcgatacccggtctcaaaccgatctgacctgctttagtggtatcaccatctttgattttcacgaaaccaatagcagcagttccgtccaggaacagacgtacagcatcattctgatagtaagaccaacggatgtacggagcaacagtaactgaatttgcagtcacttgtttcacatattcgtgtgaatagttcagttcagcacccaatgcccatgtttcattaaaattgtagccgatttccggagcaactttaaaagaagtagtgttgcctgtgctgttacgccatacgttcaatgatccgcctacgtaaatgtcctgtgcttttacagcgatagttgctaacattacaactaccaataataaaccctttttcatcttctttctttttaagttataaaataaaaacatgttttgttttcgggggcaaaattaagctacttcttcatcttaaacaaatatttagttagttttttataataatcaccaaacaaatcattattaatggctgattatcagggctgaacaaatacaattaaaaataacatcatccaacaaaaaaggctgtaatcattctctcacgagacgattacagcccaattatcagaaagttaactttctaaccagtttatctttctatccttcaattgctgcctgcgccgctgctaatcttgcgataggtacccggaacggagagcaactaacgtaattcaaacctactctatggcagaacttcactgaagacggttcaccaccatgttcgccacagataccgcatttcaaatccggacggatagcacggcccttttctgtagccatacgtaccaactgacctacaccgttctgatcgagcacctggaacgggtctactttcagaatcttcttttccagataaaccggaaggaaggaagcgatatcgtcacgagaatatccgaaggtcatctgagtcaagtcattcgttccgaatgagaagaattcagcagatgaagcaatacggtcagcagtcagagctgcacgaggaatttcaatcatagtacctactttgaaatcaatgctgtcgcccacttcttcaaacaacttggcagcctcttcacgaatcaccttctcttgttccttgaattcatataaaataccggtcaacggaaccatgatttcaggatgtgtctctactccttctttcttcagttcaagagcagcacccaagatagcacgtgtctgcatctgagttatttcaggatatgtatttcccagacggcaaccgcggtgacccaacatcggattgtgttcacacagcgattctacacgttgctggatatattgcaggcttacacccatcgtatcagccatttcctgctgtcccttcgtatcatgaggaacaaactcatgcaaaggaggatcgagcagacgaacagtcaccggacaaccggccattgctttaaagatgcccttaaagtcggcttgctgatacggaagaatcttagcgagtgctttacgacgtccttctgcattttctgccagaatcatttcgcgcattgctttgatcttttcaccttcgaagaacatatgttccgtacggcaaagaccgatacctactgcaccaaagttacgtgctacttccgcatcgtgaggagtatccgcattggtacgtacttgcagacgggtatatttatccgagagtttcatcaaatcggcaaagtctccggaaagttcggcagcctgagtttctaccttaccattatatacttcgcctgtactaccgttcaaagaaatataatcgccttctttcaaaacaatgccgtcaatttctactgtacgagtcttatagtcgatgttcaatgctcctgcaccggatacacaacatttacccataccacgagctaccacagcagcatgagaagtcataccaccacgagctgtcaggataccttcggcaactgccataccggccaagtcttccggagaagtctcgatacgtaccattaccactttctttccggcagcatgccattcggcggcatcatcagcgaagaatacaatctgaccggttgcagcacccggagaagccggaagaccgcgagtcagcactttcgcctgtttcaaagcagatttatcgaataccgggtgaagaagttcatccagtttgttaggttctacacgcatcaaagcagtcttttcatcaatcatgccctgacggagcaagtccattgcgattttcaccatagccgcaccggtacgtttaccgttacgagtctgcaggaaccataacttaccttcctgcacggtgaattccatgtcttgcatatctttatagtggttctccaatttagtctgcaatgcatccagttccttatagatttccggcatagcttcttccattgaagggaattttgcagcacgaatatcttcagtcacacctgccagtacagcccagcgctgagaaccaaccttcgtaatctgttgtggagtacggataccggctaccacatcttcaccttgtgcgttgatcaggtattcaccgttgaaaaggtcttcacctgtaccggcatcacgagagaaacaaacacccgttgcagaagtgtcacccatattaccaaataccatagcctgtacgtttacagctgttccccattcatcgggtataccttccatcttacgataaaggatagcacgttcgttcatccatgaatcaaatacggcacagatagctccccaaagttgttcgtaagcacaagtcgggaaatcttttccggtctgttctttcacagcggccttgaacttcttcacaagttcttgcaggtctgctacttccagttcgttatcaagctttactccttttgattcttttacttcttcaatgattgcttcgaacggatcgatatcttccttgttcgtcggcttcatgcccagaacaacgtcaccgtacatctgtacaaaacgacgataagagtcccatgcaaaacgggcattaccagtcttgcggatgataccttccaccacctcgtcattcagacccagattcagaatagtatccatcatacccggcatagacgcacgggcacctgaacgtacagaaaccaacaatggattttcgatatcaccgaatttagatttcatcaattcttctacacgggcaatggcctttactacttcatctttcagcaactcaaccactttatcacgtcccaacgtattatactccgtgcaaacttctgtagttattgtgaatccgggaggaacgggaattccaattaaattcatctcggcaagattggcacctttaccacctaacaaattcttcatgtcggcctttccttctgcctgaccatttccaaaggtataaactctttttttatccataatattgtgtttaaagttacattatgatttttttctgttcgcaaatctaagtatatttcgcaaaccagaaaactttttgagaaaaaactttctattaaaatgcaatttcgacattacaatctggaatattttcatagacacgaaagttttccaaaaaaaatacctacttttgcatcataattattagattggtgtaaaagtggcaagaaagagaaaagaacttcccctgctggagaaggtaacaataacggatgtggctgccgaaggaaaagccatcgcaaaagtaaacgacctggtgatttttgttccttatgtagtgccaggtgatgttgtagacctgcagatcaagcgcaaaaagaacaaatacgccgaagccgaagctgtgaaattccacgagctgtcgcccgtacgtgccgttcctttctgccaacactacggcgtatgcggcggttgtaaatggcaggtgctcccctattcggaacaaatcaggtataagcagaaacaagtagaagacaatctgagacgcatcgggaagatcgaacttccggaaatttcaccgattctgggttctgccaaaacagagttctaccggaataaactggagttcactttttcgaacaaacgctggctcacgaacgatgaagttcggcaggatgtgaagtatgatcagatgaatgctgtaggttttcatattcccggagctttcgacaaagtgctggctattgaaaaatgctggttacaggacgacatctccaatcgtattcgtaatgctgtacgcgattatgcttacgagcatgattactccttcatcaatctgcgtactcaggaaggtatgttacggaatatgattatccgcacttcatcaacaggagagctgatggtcattgtcatctgcaagattacggaagaccatgaaatggaactattcaagcaactgctgcagttcattgccgattcattccccgaaatcacttctctcctatacattattaataataagtgcaacgatacgatcaatgatctggatgtacatgtattcaagggaaaagaccatatgtttgaagaaatggaaggactgcgtttcaaagtcggtccgaaatcattctatcagaccaactccgaacaggcatacaatttatataagatagcccgcgaatttgccgggctgaccggaaaggaactggtatacgacctatataccggaacgggaaccattgccaattttgtatcccgccaggcccgtcaggtgattggtatcgagtatgtaccggaagctatcgaagacgcaaaggtaaatgccgagattaatgagattaagaatgccttgttctatgccggagatatgaaagatatgctgactcaggaatttatcaatcagcatggacgtccggatgtgattatcaccgaccccccacgtgcaggtatgcatcaggatgtggttgatgttattctgtttgccgaaccgaagcggattgtgtatgtaagctgcaacccggctacgcaggcacgcgacttacaactgcttgacggcaaatataaagtgaaagctgtgcaacctgtagatatgttcccgcatacgcatcatgtggaaaatgtagtgttgctggagcttcgataatacgttagttgaattgttcgcaaaagaaaaaagaaatggaaaaaagaccgagaagaactcctgcagaaaaagcacgtgcccaatatacgaactatgcagtcaaagagcccatggaactaatggagtttctggctgccaaaatgccggacgcaagccgcacgaaactgaagtcattactgagcaaacgggtggtattggtagataacgtaatcaccactcagttcaacttcccgctgcaacccggaatgaaagtacaaatcagcaaggaaaaaggaaagaaggaatttcataacagactgctgaaaattgtatatgaggacgcttatatcattgtagtggaaaaaatgcaaggactcttatctgtcaataccgagcgacaaaaagagcgcaccgcttatacgattctgaatgaatatgtacagcgctcgggcagacagcaccgtgtgtttatcgtacatcgtctggacagggatacatcaggattaatgatgttcgcaaaagacgaaaaaacacaacggacattacgtgacaactggcatgaaatagtgactgaccgccgttatgtagctgttgttgagggaacaatggagaaggattatgacactgtggtttcctggctgacggataaaactctttatgtaagctccagcgattatgatgatggtggttcaaaatccatcacacactacaagacaatcaaacgtgctaacggttattcactgttagaacttgatctggaaacaggacgtaagaatcagatccgtgtacatatgcag

SEQ ID NO: 4592 - DNA, 18662 bp, Unknown
  gut microbiota DNA sequence
tgaaattagccgagggtaaagtgtggagaatcagggctgcgggagatcagttgcatgagatcgataaaaaatatccggtgatctccacgattccatcggggacaatctgggaagtacaggtggttgccgataaagtagaaggatacgaagcggaaccatttccccctaatctggaacacgcctatgtatattacatggagaatcaattaaacctttggacaaacgactaaacacgatatgctgatatgacctttatatctaatatacaatcggtagcaaaatatgaaagtaaattattaatcagaagctggttcttcagagtattcacggtactcgctgtgactatcattacttttttcaattttcagttgttcgtatcggaagatagcggaggcttctggattgctacagccattccatcgaacattccttatctaattttactgttgctaaatacagggcaggctgttattgctatttttctggcatccgacttcctgaaaagagataaaaagctggatacatcagaagtcttttatgtccgtccattaagtaatgctgaatacgtcatcggtaagatttggggaaatctgcgcgtctttttgttgctgaatctcattattatggctattacggctgcattcaacctgacattgggagaagtggactggatggcttatttgctttattttctgttgatcagtgtacctacgctgatttttattattggtctggctatctttctgatgctagtattgaaaaatcaggcactgacgttcgttctattattgggatatatcggcttgactgttttttatattgaagataagttttattatcttttcgattatatggcttatagtcttcctttggtgaagtccagcattgtcggtttttccaactgggaggtgattttaaatcatcgtggcatctattttcttgccggactggcgtttgtcttttttacgatttccttgttcaggcgtctgccgaattcatcgcacagtaattatccgtggctggttatttctttttgtactctcatgttagcttttgtatgcggttattggcatatacattcgattttatatcaaagtgatatacgcgctacctatacgaagatcaacaaccaatatgtttctactccgaagatgttcattcatgaatatgatctttctgtagagcagcatcctgaagattttctgtcggaagtaactgtgaaaggagtggcattggactcatctgccgtattcaccttctgtttgaatccgggattaaccattcattccgttcattcggccggacagcaactcaagtttaaacgtgacaagcaaatagtattggtggatttcggcacgaagcatgccaaaggcgatacaatctctgcaacattcaggtatgacggacagatagataactcattctgttatttggatatccctcccgaagtgctgcaagcttccaataaaaagtttctgttcaacatagacaagcagtatagttttcagacgaaaaattatctgatgcttacccctgaaacttattggtatccccgtgcaggaacaagctatagtgataaaaatcctgactggcagcagacttatttcagtaattatcgcttgaaggtcaagcctctaccggggttagttcctctttctcaaggggaaggaaagtgtgatgaagaaggagtgtattcgtttaaaggagattatccgtctcagacactatcgttggtcataggtgactatcagcaaaaaagtgcttatgcggacagcattctttatagcgtctggcatttaagggatcatgactattttactgcttcgtttgattctattcacgataccattccttggctgatacgtaatgtgaaagagcaactggcacggcaatataaactggattaccctttcaagcgattttctattgtagaagttcctgtgcaatttgccagctatgaacgtgcctggtcgcaagcgcaggagacagtacaacctgaaatggtattgttccccgaaaaaggagctatattctgggaactggatgtgaagaggcaggtgaagaatcatatccggtggtcgggaaataatgaaatcagtatgcaggaagcccagatgcggacttttagtaactttgcctggatgtttttgcggacagaaggcgattataacttttcgtcgggtagtagaggacggggaaatctttcgtctacggcaaatccttatttccttttcccgcagatttataatttccggtacaatatttactcttcggaatggcctgttgccaatcgggctattgagctatatctgcaaaagaagtcggaaaatgaagggtgggaacgtcagataaatgggcttagtaacaatgaaaaggccaacctgctgctggaaaagcatacgttcaaggagttgctggctgatgtggaacagcgtaatctgcaaaataatatcgtaggactggaggcaagccgtctttttgcccggtcagaaataaacatgggcgtagatgctttcagagattcactatatgcgatgttgaaacgtaatacatttctgaacataaagtttgaaaatatgctggatactctgggagaaatgagccggacggatctttattcatatttgaaagaatgggaacagttgacgcctcttcctttttattcgatcggagagcccgaactgaccaaagttgtcaataaaggaggagaagaattctttgtcttgaaagtactggtgagcaataactcggattatgacggaataattcagatgaacgttcttcaaaatggctggtggtatcaaccgatggaagatcccagagccagaaaaaaggtagagatagctgcccatacaagcaaagaatttgtttctgtctgggaagaacagatacgtgatgtggaaatcaatacgatggtttccggcaatctgccttatatgatacggcaatccattggtaatgtaaaacaagaacggaataaaatagtcaaggacactatctataccttgccggaatcatccttagaaatgccgggagaggttattgtggataatgaagattccactctctttgtactttctacccctgctgtcgtaggacttctgcctaaatggctggataaagtggaggatacttcctttaaatattcgggcatatcctggtggcgtgcgcctttacaatggacggccaccaccaatgctaaatattatggtaaatatatccgttcggcctatgtgattaagagtggagacggcagtcagacggctacatggaaaattcctgtgccggaagccggtcaatatgagctttattatcatgtattcaaggatgatgagctgcgatggaatgaccgccttcagggtgaatatcatttcagggtggcatacgacagtgagatggaagatgcctatatcaatttgagaaaagccaatgagggttgggaacaactcggtacttactattttagtgccgatacggttcgtgtcgtgctgacggatgaatgtaagctgcgttctgtgacagctgacgcagtgaaaatagtgaaacgataattattaaaacagcaaactatatgcaaagtgacttactactattaaaaagaatgctgctgacaatcgtaacttttacgggaattgccctgacatcacaaggacaaattcctttaacgattgacaaggcaatggagattgcgcaggagaacagtccttctcttcgccgttcctacatgaatctggagagatataagcagaatctgctggcgcagaaggcttcattaaaatctcgattttcattaaatctgaacccggtggactataacaagaacaggcgtttcgataatcgtctgtcacaatggtacacgaatgaaacattcaataccagcgggacctttcaggtcgatcagcccattctatggacagacggtacaatttctttaatcaaccgttttggctggcaggacaacagctccattatagaaggcgataaaactagtaaccgggcattcagcaatgacctctatctgcaattgactcagcctattttcacatacaacaagcgtaaaatggaactcaagcaaatagagtatgattatgaaaatgccaatatcagttatgctttgcagcaactgaatacggagaaaagtataaccgatcagttctattctgtctatatggcacagagtaatctggaaatcagtcgtgaagaactggttaatgcccagcaaagttatgatattatcaagaataaggtagaagcggatttagcagcgaaggacgaactctttcaagcggaactgaatctggctacggcacgttcgtctgtagacgaaagtcaggtgaatctggagaatgcgaaggacaaactcaaacagactctcggaatgaggctggatgaagatattctcgtatttgcggaagtggagattaaaccgattcaggtaaatctggaccaggccatatcgcatggattgggttcgcgtctggaacttcgtcaacgtgaaatagagagcaaggaacttgagttcgatatgattaagacaaaagcgctgaacgagtttaaaggagatgtatccatctctttcggattgataggagataatagccacctgaataaagtctataataatccgacacagaatccgagggtttctatcagttttgctgttcctattttcgattggggtgaaaagaaagcaaggattaaagcacaaaagatggcccaacggattaatgaactcgagtttcaagaggataaagtggatatcgagctgaatattcgtcaggtatggcgtaacctcgaaaacctccggactcagattaagatcgccgagcaaaatgtacagaatgcacagttgacctatgatctgaatcagactcgttatcgggaaggtgacataaccggtatggaaatgagccagttccagactcagctttcgaataagaagattacttatacgcaggcgttgattaattacagaatagaattacttaatcttaaaatcctttcattgtatgatttcgacaagaatatccctcttgttcctatgaaagacattattgataaaaaataagcagaccatgaaacagtatcaaatttttattgcatcttctttgttaacaaccttattgttaaccggctgtggcaacaaaccacaaaacgcacccaataatattgcaactccggtatctgtcgtggagctgaagaaaggttctatcagtaaattaataaatacaacaggaacagtgcagccgacttacggtgcatctcagaatgcggaaatgagcggattttataaacttcagactaatccgagaaccggaaaacctttcaaaatgggagacagggtaagtaagggggaactgataatccgtctggaagacaaggagtatgaaaacggaatcgctattgacgctaaaaaactaagtcttgaaattgccgaacaggaacagtcaaagcagaaagctctctatgaaaaaggaggggtgacgatgagtgaaatgcggaatacggaagtaaaagtaacgaatgcccgttacgattatgaaaacgcaaaactcaatctggagaagatgaaagtgaaagctccgtttgatggtgtgattgttgatttgcctcactatacggctgatacaagagtggagcagggaaaggctatggtgagtctgatggcttatgataaaatgtatatggatatcaatctgccggaaagcagcattcgttatgtcaaggaagcgcaaccggtatatattactcattataccatccccggagatactttaaaagcgagagtcggtgagttgtctcctgcaatcagtacggagacacgtacttttaaaggaaagattctgattgataatgaccaactgaagttgcgtccgggtatgttcgccaaagcagatattatcgttgacagagctgatagttctatcattatacctaaagacgtaatcttgtccaatcgtcgccggaaatacgtatatatcgtcgaaaagaatacggcaaagatacgcaatctgcaaacaggtctggaggatgaatataatatcgaaattctatccggacttaatgtaaatgacaatttggtagtgaagggttttgaaacactgaaagaagacgccaaagtcaaaatccaaaagtaaatcatggatgcgatatatgaccgcatcttttgaaaataggaaatacttatgaagaatataatcaaatttgcagtaggcaatccggttacgatttgtatggtagtatttgccctcttattgctgggaaaagtatcatacgatcagttgagtgtggatttattgcccgatctgaataatccccgcctgtttattgaattaaaggcgggtgaacgccctcccgaggagatcgaaaagcaattcgttaaaaatatggagtctatggcgatccggcagagtgatgttactcaggtctcttctgtgattaaagccgggacggcacgaattactgtagagtatacctggacaaaggacatggatgaggcttttcttgatttgcagaaagccatgaatccgtttgcccagaacaaggatatcactgaactgaagattacgcagcatgatgcgaacttgtctccggtagttttggtgggaatgtctcatcagagtattacagatatggcggaattgaggaaaattgccgaaagctatatccgtaatgagttgattcgtctggaaggtgtggctgaagttacgctttcgggagaagaagtcagcactcttaccattcagactgatccttataaactggatgcttttcaactgaaaatagaagatatcgcttcgcgcatcgaatcgaacaatcagagcatatccgggggacgggtcagtgaactgggattacaatatctggtgaaaagttcgagcttgtttgcttcagaagatgattttgagaatctgattgtcggatacaaaccgatacaacaacaagaggaagcatctggaaacaatgctacgggtacagcaaccgccaacagtaataaagctcctgtttttttgaaggaagtggctactgtgcagtttttgaacgctcgtccggagaacattgtacggattaacgggaagcgtagtatcggactgtctatttataaggagatgcgctttaatactgtaaaagtggtggatgaggtaacccgccaattggcagtgatagagaatgcattgcccggttatcattttcaggtgatttcgaatcagggtacttttataaaaagtgcgatcggagaagtaaagagcagtgctgttttgggtgttatcctcgctattgtagtcttgtttgtattccttcgccggatggggacaacactgattgtcagccttgctattcccatttcgattgtggctacttttaatctgatgttcttcaacggactgtcactgaatattatgacattgggaggactggcgctcggggcgggtatgctcgtagataatgccattgtcgtcatagaaagtatcttccgaaatcaggagaaaggattgagtatcaaagaggctgctattaacgggacagcagaagttgccaatgcggtaattgcttctactctgactactattgtcgtcttcctgccgattgtttatcttcacggagcttcgggcgaactgtttaaagatcaggcatggacggtaactttctcactggtctcttctttgtttgtggctatcctggtgattccgatgttatatatccagctttccggcaagaagattaagctggaagaagtgaagtccattcgtattacgggatatagcagagtgcttcgcaggctgattcagcgacgttggctggtgatcggtatggcagtgttgcttcttatcgtgactgggttactgactccgtttatcggaactgagtttatgccccgtgcggaaagcaagacgtttacggctgtagtcaaaatgcccgaaggtacacagatggaacgtacttccgctgctgtaggcaatttggaagaattgttatataccattgttggcagtgattctttatgtacggtatacagccatatcggagagggaagtggttcggaaaatgcgatatttgaaggagaaaatacagcaatgatgaaagtgatcctttcaccggaatgtacactttcaccggaaaaggtgattgcgtctttcgtggaatcggccaagaatcctgacggactggaactgacgattcagcaggatgagaattctctgagttcactgttaggaagcgaaggggctcctattgttgtggaggtcaaaggagaggagttggatgagattgctcagttgactgaagaggtgaaggaacggatgattggcgtaaatggaatctatgatgttattacttccgtggaagacggtgctccggaagttgtgatctcgattgaccgtacgatagccggtatcaataatttgagtgtggctatggtaatcgaacaattgaagcagcaattaagcggtaaggaagtcggtaaaatggaatatcgcggtgagatgcgtgatatcgtcataaaggtgccggatatcccgttgagttctcttggtgctcttgtcatcaaaagtggaacacaggaatttgtattacaagagattgctaccattactcacggacaagcgcccaaggagattctgcgccgcaatcaaagccgtatcggtaaggtgatggctaatatggatgcgagtaaatcactggataaagtagcagccgaagtgcgtgaaacggtgaaaggtattgaattgcctgctaactacagtatcacagtgacaggagaagaagaaaaacgacaagaatcaatgaacagtctgttgtttgctctgatgctttctgttgtacttgtctatatggtgatggcttcccagtttgaatccttgctgcatccgtttacgattttgctgactattcctctggctgtagtaggtgctatcttacttttcttcattaccggaaccactatcaatatgatgggagtcatcggtattgtcatgctgggaggtattgccgtcaataactctatcattctggtagaccgtatcaatcagcttagtcaggcgggaatggagttgactgatgccattgtagaagcagggcaacagcgtatccgtccgatcatcatgactactttgactacgattctggccatgcttccgatgacattcagttttggtgaaggtgcatctttacgttcaccgatggctatagctgtgatcggaggattgataacttctactctgatgagtttgatggttattccttgtgtctattatgtcttggagaatatcaaaagacgtataaatcgccgaactaaaaacagctgaagatgaactttttactaaataggagaataacgatttgtatgctgtttattgcactcagcctgctgggctatgtgtcgtataaacaacttccggtggagttgctgcccaacgcagaacttccggttctgtttgtccaggtgtcgtcacagcaggatatggacccttcgtatgtagagtcggaagtgattattccactcgaaggagcggtcagtgcgataggtggagtagacaaactgcaatcctacattgacaggaggcagtccagcatacagattgactttaaaaagaatatcaacttcaagatgaccagtcttaaactgcaggagaaagtgaatgaaatcgcagcctccctgccgaccggttttaccgtacaggtacagaaagtggatattgctcagatgaataataacttcatggtgcttcaagtgcgtggtatgggaggaactgaccgtgtccggagtctggtagacgaggatgttcgctctgatctggagaacatagatggagtagcttccgtcaatatctacggaggacggcagaaagctattgaagtacgtctgaatccggaggcttgcaaagctctgaacctcacagcttccaaaataagcggtttgctttcgcagaatacccaggaaaagacatttgtaggcttcgcagatgaacccaacagcaagaattttgtccatgtcaatgcgatgtataccaaagtctctgatttggagaatatagttgtcgctcccggtcctattctgctgaaagacgtggcaaccgtcttttttgacttgaaagatgaaaccacttatagtcgtgtgaatggaaaagaagccgtctcggttgctttgatcaatgattcacaggctaatctgattgaactttcacaccgtgtatccgatgtgattgaaaagctgaatgagaaactggctccgctcgaactggaaattgtcattcaggagaacaaggctgaaaccatggaaaataatatcaaccagattattaatctggcattggtagggggattattggctgtgttcgttctttggcttttcctgaagaatatgcggctggtgttttttatcgcactttccataccgatttctgtctatacggctttcaacttcttctacgcttttggtatcactatcaatagtcttaccttggtaggaatggcgttggccatcggaatgctgctggataatagtgtcgtggtgcttgagaatatttatcgtttgtcgggaaacggctatacgcccgaacgttcggtaacgcagggaacaaaagaagtgtggcgctccattgtggcggctaccctgactaccattactgtattcctgccgttcgttttttctgataatttcctgataaaactgatcgggcaccatatcggagtatccattatatcaactttgacgatctcgctgtttgtagctttactttttataccgatgattacttaccttcttttgaagagtaagagtgggaacagtgtcgtttatgaaaaagtctcgatcgttcagcgtccgatgcaggtctatctggtcttattgaagacttgtatgcgtaatccgggagtgacagtctttggagctgtgatcttgctttttgcaacgttgattttgtcattgaccttgaatgtgcaacagatgaaagaagttgcttcagaccggttcaacatcagtgtcgtgatgcctaccggaagtacgcttgaaaatacggataagattgtaaaggtactggaagaacgtctggaggattttccggaaaagaaagatctgatttgccgtattcgggaaaaagaggcgactctgacactcgttttgcaggaagattacacaaagatcgccaaacggaaaatagccgatataaaagcggatgtgcagactaaagttgccaatatcaatggtgcggaaatctatgtttctgatgctatgggaggcggaggagataactcggctctgagcagtctgggcggatttatgcgtttgttgggcatcggtgacaacagtgaacgggtggtgatcaggggatctgatttcgaaatgatgcagatggtggcagaggaagtgcgttatttgttggacgaacaggattttgtacagcatactcatgtttcgtatactccccgtcaggcggaaataaatctgaactttgaccctattctgctgactgcctatgatattaaccgtggcaatattaccaccggattaactgcgcttaataatgaatactcttccgaagctactttcaaggtgggagaggatatttatgatattattatccgtgacgaaataccggaaaaggaaactgaagaagaggcacaggaaaaagctcagaaagagaaaactgtggatgacttgcgtgctatccggatagaaaatgccaatggcggtatgcacaatctagaagatatatcgtctctgaattatggacgtgggcgttcgcgcatcatccgtgtcaatcaagataagcagattgaggtatactatgcttttccgagagatgttcagtcttcgaaagatttattgggaggatatcgttccgatatcgaccagttgattgccagttataatcttccgtccggagtcgctgtgcaggtattccatgaggaggatgaattcggggatttcaaattccttattctggcagcttttcttttgatatttatgatccttgcttcagtcttcgaatctgtagtgacgccttttgtgttgctttttaccattccgttggctgctatcggttctttgctggcattattgctttcgagcaacagtctgatgaatgcgaatacactgacagggttccttattctgttgggagtagtcgtcaataacggaatcattctgatagattacgccaacattttgcgtaaacggggataccgtcggaacagggcgttgatgactgccggtatgtcacgtattcgtcccattctgattacttccatcaccacaattgctgccatgcttccgttggctatgggagatacggagtatgcaggggctatcggtgcaccttttgccattacagtgataggcggacttttcttttccgccatgctgacgctgattttaattccgacagtttgtatgggactggaaaatgtgcttcagtggtaccgttcgttatcccgtaaactatggaccattcacctgattctttttgtgtccggtgtaatctgtatctggctatacactgacggaatcctttggcagtcaatctatctggtagcactgattgcaggcataccggggatgacatactttgcgcaaactagtcttcggagagctaaggcggaggttatcaatccggatgaagaaattcgtatttctgtccgcaatctggttaagatctacgattggcctggacacatcagccgtcagtggaacagtggtttgcaattacgcaaacgtctgggattgagcaatgaataccattctttgaaggactttatcaatgtgctatggcagtttggtatcttactgtttgccatttatttcacctatttcttcattcataacaggctttggatattcctgttctcgttcgctatttatgcagcgatactgtatttgtggagaaaggtacgttcctatttatattatcgatacggagataatcgggtaacaaagatcgtaaaccgggtgatattctggagtcttcctccccttatcctgtttcagttattccggaaactggataataacgggctggtcatcatgatcggattgttatggcttgtgggtattgccatctatgtcacttcccagtatctgtatgatcatgatgtaaatattgagcgtgtcaccggacgatttgcagggcttcgccgttcctatttccgcatggtgaagagtgttcctatgattggaaaacgacgcaaacctttcaaagcattgcgtggagtgtcattcgagattcagacaggtatgttcggactactgggacccaatggggcaggtaaatcgaccttgatgcgtgttatctgtggtatctttgagcagagctatggtagtatctggatcaatggtctggatacacgtatctacagagaagagctacagagtctgataggtttccttccacaggaattcggaacttatgagaatatgacttcgtgggagtttctggattatcaggctatactgaaagggattgtagacggtgagttacgaaaggagcgtctggattatgtactgaaagcggtacatatgtacgagcggaaagacgaaaagataggttctttctcgggaggtatgaaacagcgtattggtattgcgcttattctgcttcatttaccgcgtatcctggttgtggatgagcctacagcgggactcgaccctcgcgaacgtatccgtttccgtaatctgctggtagagttgagtaaggaccgtatcgttattttctccactcatatcattgaggatatatccagttcctgtaatcaggtagtggtgatcaataagggtgaactgaaatatttcggtgatccttcggacatggtggaaatggctaatgggaaagtatggcagtttaatatagataagacagaatttgaaaaagtactggacaaatcgttggtaatacatcatattcaggaaggtgatacgattcgggtgcgctatctttctgtcggacagccttatgaaggggctgtagaggtagaagctaatttggaagacgcttatctctgtctgctgaagaatatgaattaaaaagaaaagaaggatatgacattcaaacaattgatacaactgttgcctaaagtagtcaggtataacctgaagattatatttgccgggaagtttttctggtttctgctggctgcatttggcttttttgctcttttcatgtttcagaatgcctggaaacgggaggagattaacgagggactcatctatagcatcctgatgtttccgtctatgctgcttattttctatccggctgtattcggcattcagaatgatgaagatagccggatattggagattctctttggaatccccgactataagtataaggtttggggcgtgcggttattgatgatttatgtggcaatttttgttattctgattatcttttcatacatagccattttattgctgtatccggtcaatccgcttgagatggcattacagttgatgttcccgatactctttttcggaaatatggcttttatgctgtctaccattacgcggagtggaaacggaactgccgtatttatgattattataggcattgcattgatgttcttaggtaagccggattctttctggaacgttctgctgaatccttttcgtgttcccgataatgttcatccgattatttgggagggaatccttatcaaaaaccgcattttccttttatccgccagtttagtctggatgatgatcggattactatatctacagaaaagggaaaagtttgtataacagcagattaggatgctgaatattctcaagtgttcttgctgcgatgagaaaaaattctcactatgatgagaaaaaagtctcatcgcagtgagaactttttctcatcatggtaagtatagtcctatgtatgcaggaaccgaaatagtgacttagaagtagtatcccagattcacataacaacttcctttgtcagtctgattggaatacccgaacgtaatctccaacggaccgaacatactgtccataccatatccggcactgataccaaacagttgtttcccttttagaatttcgaagaagtgactgtctgtcaagccataattacctgtcagagtgagataatgaatgcttcccatccgttgtctgagtttcacggatgcaatcatgattgaattgtccatcagttccatattggtcacaccggcaaacggcagttgctgtggaatgtagagtccgtatacttcgccgccaatggcattttgcaagggataggcgatgtcttttccaatcagaacacgaccatagatggatggaatgatagaaaaacgtcgggttacgggaactacgctggcccacgaaccgctcagtgcggagaacggggcgtgatcattatactgagccatattatcggtgtagagcgaataggcagctttgaattcggttcctttggaagggaaatatcctttgtcgaatgtactatagtatacctgagcgaaataactcaggaaatgttcggattctacatccagcccagtgagttccggtttcttgaaaagaaaatctttgtatttataatattcgaaacgaagtccgagtccgaagcggaggtttttgtaccagacatccgaaaagccaaattcagctaaatgatacttgtaagtagtgttataggcacgttcgccttcatcatagatgttgatgtcattatattgaaacatatatgagaaattgaaattgcgttgctgcatcggttcgagagtgtaatcgatgcgtgcggcatatcgctttcctaatcggccggtcagggataatcgggaaggaacatgagttttgagatccgctgtggcattaatcagcagggatgctatttcttccgagtcgaaacggatgcccagattgattcttttctcatatttttcttctaacaagaaattaaggtgatacccttcgggagtgtcggtaagtgtgtagctggcgcttgagtaagaatgactgccacgcaactgatacacagcttgttctatctgctgagtggtaatgttactgttctctttgagattacacttcttcatcagccattttttgtcatcagcctctacgccggagaacgatatatctgtgacgtatactgtccgtgaattggaaagagaagagtacggtccatgttgtttggggacataattgtccggtataccgatttctttttttaaggcaatcagggaattccactgtgcacgtgcggcttcttcgccccgacgcatcagggaatcgatggctgccgaagtgaagctggcggaagaaaatccgtctacatttaccttgatataggtatcagtgagttctacattcttttcatgattggtctggcaagtgagatcaacaatctgccccaatatgtccggagcgctgttgagcttgtcggcacttttcagcgcattctgaacatcgactccgataataatatcggcccccattgctttggccacatctgccggatagttattgacaattccaccgtcgaccaataccatgctgtcttttctcaccggagtgaatacaccggggatggccatgctggcacgcatcgcagtagagagtacgccatcatggaatacgatctggtccccattgactacattggccgatacacaggcgaaggggatcggtaacttattaaaattgatcgagtcatggtagcccactgtcagatcagagaacagattggcaagattctgtcctttgataattcctccggacatggcagctttcgggttctttgtgaaaggaagcgaaacaatgtattttgcagagcgttcgcgttcggtgagcgacatggcactgcgtttgatacgatcgctcaaaaggaaagtccagtcttgcttgcgtaccatactgtccagttgttccggagtataaccgatggcgtaaagtccaccgactatagatcccatactggtgcctactatataatcgatcggaatgcctgcttcctcaatgactttcagtgctttgatatgtgccactcctttggcaccaccgccactgaggacgacgccgaccttcttccgttgttcctgtgaataaacagaaaaaggtaatatcaggcacattgcaaaaactaatgttgaaaagatttgttttttcattagacatgttattgtgttgatgtacaatataactacaaatgtaggggataaattgtttagttgatgaaacaagaactataaaaaatgttctaaaagtcggaaatgtggataaattctacactttaaggatgttttccacacttccgtcttctaagaggaaaaatgtaatatgttgataataaacagataagataaaacaggatattttggtatgtgtattgcataatagagtgtagaacaaacataagttaaattaaataataagattcgatatgagattattcttttcgaaacatgagttgaaactgaggagaaagagaaccattgctgctgtagtatgtatggtaattgtgttgggagtgtattggatactgacccgacctcagaaggctgcgccggaaatgccgacagtgattgttgaaccggttataaaagatgatgtagagatattcggagaatatgtggggcgaatccgtgcccagcaatttgtcgaagtacgtgccagggtagaaggctatctggaaaacatgctttttgccgaaggcacttatgtaaataagaatcaggtcttgtttgtgatcaatcaggatcagtatcgcgcgaaagccgacaaggcacgggctcagctgaaaaaggatgaagcacaggcattgaaagctgaacgtgacttgaaacgtatccgtccgttgtacgaacaaaatgctgctagtcagctggatctggataatgcggaagcagcttatgaaagcgctgttgcgacagtagcgatgagtgaagcggacttggcgcaggctgaactcgaattaggctataccatcgttcgttcacctcttgccggacatatcagtgaaagaaatgtagacttgggaacgcttgttggtccgggaggaaagtctctgctggctacagtagtaaaaagcgataccgtattggtcgatttcagtatgacggcacttgattatctgaaaagtaaagaacgtaatattaacctcggacaacaggattctacccgttcctggcaaccgaacattactattactttggcggataatacggtttacccctataaaggatatgtcgattttgcagaaccgcaggtcgatccccagacaggtactttctccgtacgtgcagagatgcctaacccgaaacaggtattacttccgggacagtttaccaaagtaaaactacttttggacgtgcgtgaaggagctatccttgttccgatgaaagctgttaccattgaaaaaggcggagcttatatttatacaatgcgtaaagatgatacagtagagaaacgttttatcgagttaggacccgaagtggggaataacgtcgtagtggaaagaggacttgctgtaggagagacaattgttgtagaaggtttccataagttgactccgggcatgaaagtacggatcagtcagccggaaatggaggtgaaggataccactatggtggcaggtgattctacaacaggaatgaaggataacgcaaaaggagaataatcaatgaaagttagtttttttatagacaggccggtattttcggctgtcatttcc

SEQ ID NO: 4593 - DNA, 59330 bp, Unknown
  gut microbiota DNA sequence
gccacgagatagaagctatgccgcagggataccagacaatgatcggagaaatgggcagaggtttgagtggagggcaacggcagcgtgtactgatagcaagagcgctctacaaggatccggactatctgtttctggacgaagctaccaatgcacttgatacgattaatgagcaaaagatagtaagggcattaaataacgttttcaaaaacaggacagtcattgtggtagctcatcggctaagtacgattcgcagggcagaccaaatcatcgtattaaaagcgggaatgatcatagagacaggcaatcatcaaagcctgatgacaaacaaacagtattattacaacttaattcaaagccaatatgaaccggaaacaaacaccttctccacagaagaaagcgcagactaaatcatccggaagaagcgaagaactggatgagattattgaccggatgcccatggctttcggaaaatgggtggcactggcggtcattgtatttgcagcattatttctattgttcggatggattatcaaatacccggatatggtgaccgggcaaattaaaattaatgcgcagaacccgaccgtaaggcttgttgccaacagtacggggaatttgctgcttctttcgcacaaagcacaggaggaggtgaagaagggggaatatatagcggtcgtgcaaaatcctgcttctacagaggatgtgcggaagattgcggatttaataaatcgaatagatttcgatggcacccatttgcttgctcttaaagatacatttcccgacaaggtatatttaggagaaatcaaccctcaatactatgcctttcttgcagctctgaaagctcaatgtgactatctgcagcagaatgtctacgaaaagcaaagagagaatatcacgacgagcattgaatggaaaaagaagattgtccgagaagcggaggactcgcagaaagctgcaaaagatagaatggatgttgcccggaaatggcttaaacgttatgtctctcttgatcagcaggaaatagcgacttatgaatatgagaccgatcagattaaaaataattacctgacaacagtacaggaggtacaaaacataaatagggagattgcctcgacccgcatgcaaatcacagaagcataccatcggctggagcaactggaagtggaacaactggagaaagaacgggaactgaaagtggaacttttgtccactcatcagaacttgatagcaaatatggccgcatgggaacagaaatatgttttcaaagctccttttgatggaaaagtagagttcctgaaatttatttcagatggtcaatttgtgcaggcaggagaagcggtatttggagtgatacccaaggaaaaccatatatatggtcaggtgctgcttccggccaatggagccggaaaggtaaaagaaaacagtaaagtcgttattaagttagagaactatccctacatggagtatggatatatagagggatatgtatcttctatttctttggtcacccaaacgcagaaaacaggagaaaagaccattgaaacatatttgattaacgttgaattacccaacggattaacaactaattatgaagagactctcgactttaaatatgagttgggaggaactgccgatattattgtaaaagacagacgattgatagaacgcctgtttgataatttaaggtatcggactaaataaaactcatactcaaatttacgctccataggaattcaacacgacttttgccctcatgctctaacagtccgtctgtatccctttattcatcgtggtttcgggcgtggtagcaagtgtggtggcaagtatgagagcaaacggttgctctcactcagtttcgtcgcattatatgttgttttttactgctattatttgatttacagagtattaatgtctgaagtgtcaactattaacgattggcatttcagccattaataactgagaaatcaggtgttaatagctgataactcacgcattattgaccgatatatgattgaatgcttcctgaaagatcaggttgattgaaacatttcatgcggtcaagttaatccaatcatataagtcaagcgccagtttcctgcttgggaaactggcattcccttataagggaacggcagttccaaggcaggaaacgagcgtttccgatatagggaacgctcgtttccaaaataagaaattaaaggaaactgtaagccattcagatacaatgatatagggaaatcatggtaagaaatgaaccatctacgtgtgattgatgtcgtattttattataaggttaatgcgagcaaaaagtctgtttttattagaggaaaagtttgtatgccgtaatataatatcgtacctttacaggaattaagcgataaacaatattggtagataaacagacaaaaaagaatgaaaataactttaatcagacaagacagcgggagtggaaaagaagctctaagcatatgcgaagcaggtacattattcaacaaaatgaaaacggagacaaaatcgggacacattacggctttgcgaaacctgataccgatgctggaaggtacgtacagccagtacgaacatatagacaaactgccatatatctattctgccgtagaatgtacccgcactaaagaaggcgaacgaaaaatgaaacaatataacggactggtgcagttggaagtgaaccggctggcaggcccgtccgaaatggaatatgtgaaacggcaggcggcactcttgcctcagactttcgccgcattctgtggttccagtggccgtagcgtgaagatatgggtgcgttttgccctgccggatgacagaggactgcccgaaaaagaagcggaagcggaattatttcatgctcatgcctactggctggcggtaaagtgctaccagccgatgcttccttatgatattaatctgcaagcaccggtgctgacacagaagtgtcgtatgacactggacgaatctccatattacaatcccgatgcagtgccgttctgtctggaacaaccgctcgctatgcccggtgaagaaacttttcggcagcgcaagcagggtgaaaagaatctgctgttgcgcctgcaaccgggatatgagtctgcaaaaacctttacaaagatttatgaagcggcgttgaacagggcatttcaggaaatggaagactggaagcgtggagatgatttgcaacctttgcttgtacaccttgccgagcattgtttcaaagcgggtatccccgaagaagaagcggtccggcagacactcattcattactatcgggaagaggatgagcgaatcatacgctcgacgattcataatctttatcaggaatgtaagggttttggcaagaaaaacagtatcggaagggagcaggagacggcttttctgctggaagaatttatgaaccgtcgttatgaatttcgttataacaccgtgttagatgatctggaataccgccagcgtgattccatccacttttactttaagcccgtggacaaacgtgtgcgcaacagtatctctatctgtgccttgaaagaaggcatcaatgcctgggatcgtgatgtagaccgttttctgaattcggaatatgttcctttgcacaatcctgtagaagaatatctttatgatgtcggccgttgggacgggaaagaccgtatccgtgcattggcaggattggttccttgtacgaatccgtactggcaggagttgttttatcgttggtttctgagcatggtggcgcattggagaggggtggatcggcagcatggaaacagtacgtcacctttgcttgtcggtccgcaagggtatcgtaagtcaacgttttgccggattattctgccgcctgagttgcgtttcggctatacggacagtattgatttcaagagtaagcaggaagcggagcgttatttaggacgtttttttctgatcaacattgatgagtttgatcagatcaatgtcagccagcaggggtttctgaagcatttgttgcaaaagcctgttgctaacttgcgcaagcctcatggcaatactattcgtgaaatgcgtcgttatgcttcctttatcggcaccagcaatcagaaagatttgcttgccgatcccagtggcagccgtcgttttatctgtattgaggtgatagctcctatcaaaaccaatgctaccatcaattacaaacagctttatgctcaggcgatggaagccatttataagggtgagcgttactggctggatgatgaggatgaaaagattttgaagcagacgaaccgtgaatttgagcaggcgagcccgttggaacagttgttccattgttatctccgtccggcggaagaagaggagggaggcgaatggatgacgtccatgcagattctgaattatttgcagacgaagacacgggacaggttggctatcaataaggtagctgtgttcggccgtgcgcttcagaagctgaatattccctgccggaagtccggtaaggggacactttatcatttgctgaaaatagaatgattggtagcaacgtgagggcaaacggttgctctcacgctgctaccattggatctctaatcgctgtaactccgatgaatagggggattgaagcgggaatgagagcgtgagggcaaaagtgctgtcatttttcatttggaaaaaagttatttcgctacagtcgcctcaacgagactatccatatcaaaatcaatattataatccttttctatttgaatccttcttatttgattgaccagcgaatgcggtttcacccttcgggtcatctctatttccagcaacctttcgggaaagcgtttacggatttcatctatatttctcatgaaaagtgaatctttattttcgtagagagaataggcggcttctgccaggataaaagctcccaagctgtcgggatattgttttagtactgcttgaaggaaaaccttgctttttccaaagctttcgtgggcttcagcgtgcatatctttggcagcttgaagtagtcccagttggaacagatactcaccggtaattgcgtttttctccatagcaagtgtttgtatgtatagggcggagtccagttctcccatttcagataaaagtttggctttcatgccgtaatagtcgggatttaaactgtcgattgccaaagctttgtccagaaagcggatgcattttcgggtggagtctacatcataggaagattccatcagggctattgcttgccggtagaggctgtctgcctgaagattgatacaatgaggagtgatgtctgctttagactcttgccgggaatggcaacctgtagctgcaataatcattggcaagatagttaataagaggcttaatttcttgggtttcatattcataattcttatcatccaattttataaaaagtaagactggcgaagaactcgataagaaaatgtatctaatctgatcttattttgttcttcgtcagtcttttcttgttttacttaaatgcctagctgttctcttgcccaggcttcatcatgtcttattctgtaaaggtatatttcggacatattccaccatgcgctgcctgcgacagtataatccaatggatctttgtcacggcgagccgtaggagtaaatcggatatagttgtaagcttgctttccactcacattgtttttagctgtggcatggccaccgtttgttgtcggcagattgaattcttcattacccatactttcaaagaactcaccgttcatacttccatatattgttgcggcttttacgtcacctccgttattcactccgctttgacgtgcatcatattcaaaacaaaggtcctttaatggtttgttcagtttgatctggacataatgtgcttctgttgtaacaggagcattccacttggtatgataataagtattcaccttcccgtcaatcaatgccggtaaaccgcctccgtctccgacatgattagcattgtcggaaagcatatcgatagtaagagtaacacgttccatttcggaagcttcaccggaaatgcctgttattgttaccggactatctgtctccataccagtcggaccataggtgttgatagtaaatgagtattcacctgcacattggtaagtatcatctatgatataggatgttgtcttatagtcatttattaagatctctttattttctttcgtgactttatcgtaataggtaatctttatcttgttgaagtctacatcttcaggtatctcccattgcagctgaatacttccggctcccggagtagcagtagcattgatcacatttaaaggaggtgtcgcgataaatccggcctgttttactgtgactacgaactgacttggtactttgtcggtgctattggtactcttgaaggttatctttccttcacgaggttgattctcaacttcagtgttggctttaatgataaagctttcggagacatcacgcagtgctcttgaagcgggtaatgatactggagtgatccaggattgggcggattcttcgacttcataggtatatgacacttcaccggcaggagaatttactttgaaaggaatagtgattgtttctcccattgctttcacttcatagatcttcttgtcttcatcgatttcgactatataacctctgggttgttgctttatcaggaaagaagctgtatagctgtaattctgggaagactggaggataatcgtacaataacgtacgtcagtctcggtgcttttatccagcgtaaatttcagttcctgtttgtttacgtcttccgctgcacgcgtctttgcatcaaatgtggcaggttgctctgccagacgtatccagttgcaagtgtctggtataatgatattatccagattcaggttggtcgctacaggaattgtcaatgtttctctttctgcatctattatttctacatatccttcctgttgtagcttgtcacctataaggatggccggttctttaccaaactgcgagacagtgatggaatagctttgatgaccataggctacagtgatttctgcccggcgttgtttgtatatattgtttgcactggcagatacgactactttgccctcgtgttgtactaccttgcaccattctgcattggactgggcactccatctgtcgagtggtacattggtctgcacttcaatttcatgttctcctcccagaagtgggaaagtgataggtgcctgacttttatcaggaactacgagcgtttctactttaaactcggtttcgtaatcgggcgaacaagagataagtccggaagcaattccgaatatgcttgcgagcccgatgattaatatattttttttcatactcatttgatttgattacaagttatctactcttgggttaaattcatatcgtagtttggctttcacttcccggtaaggggcggtggattccaggcgatatttataatgcagacggaactctttgtaataagtggcacgtccgtcgggagtacggatagcgtttaacaggaatgtgttgtcgtaatcatcgattggagtaagttgtactacatcgaccggatccacttccacatcattaactctgtcatgcgctctgatggtaagttctctggcctgaggattctccggttgctgctcgccaatttccagaatgatactcttagatacaattctgcttcttgctgtcttataatcgccaagatcttcatcacctgccatcatgcgtaccgaattggcaccgatcgggaatacttgattggcatttgtcggtctacggacttcgggactaccactggggttaggaattacaatcgtactgcttgtataattgtagtaggtagaagtctttgtcgttgcgtaatagttttctttatagatacgcaataatacatgacttttatccggattataattaggtgttttttccggatctatcttgtaatccagaaaataaatagaatccggtgaaatcctttccagatttttcagatagatcggaaacattactttggaagtgcctgcctgaatatccagttccttattgggaaaatcatagcattcatcgggaagcagtttggcaaatttttctttttctatatcaaagttggatttgttgtatgctttcagcaaagagtccgattccagaagagctacatggtgtgtgttagggcttatttgtgagccgctgaccgtggcaaccagatagatcgtatctttttcttgtcctacattagccacctgccggtcgtagatcagactcgaattactgagtaagcctacttcgttccggtattgttcctggtcgaaatcgtattcattgcaagcactcaatacacctataagagtgcagagcattatattaaatttctttttcatattcagtctgttattcatgttttgatattatctgtcccatccgaaattctggtcggcattgggaaccttcagcaattcatcatggcggatcggtaagaataccattttaggcagtgcaatgcggtctcgcacattttgtgtattgatcgtcacaatattccagaatccttcattaccgttggcatttgtacggtcttttgtcacatccagtccccgccagttggagctgttggcatcttcgtccagataggttccccacctgcgcgtatcgaaatatcggtatccttcgttaaagagctctacctgacgttcattgcggatgattttttcaaaattgtctgcttctgccatgtcgttggcatctactcccggcaagccgacgcgataacgtatcatgttgaaatatttagccatttctgccggatcacggctaacggtttcctcaataagtgtacctgtattgtcggatacttctacggtcactgtaccttctacacggttcaatgcttctacatattccagtagcacttcaccataacgaatgatagggaacggtttagggctggtgacgaatgcgccttttacactccctttgccgttagcccatgagtcgtccggatgaatgtatttgacgggaacataaccgctgacactgtagtcgtttacgttatttccggcaccggcaattccggcattggtatcatcgtgagaataccagaattgctgattgacgtaggaggcgtcggtagaagctgaactcatcggccagtagcgacccggaaaacctatcgaggcatagaagcgtgccgaacgattggcgtacatcataggtacgttttcccttagtaggtatgtccccagttttttggattcgccggtgagtctgctgaagtccggttcatatggatattctgccgatgaattatgaatagtccgcccatctgccatcagatagcaatcaattaccctctgcggcacagacattgaaccccatccgccaaacttgacagggaatgagtgatgggtatagttagtgacgttactggattccatcgcccagatgaattctttattagtctgtatgataccttctcctgtgaacatgtcggagtaagagtgataaggatcgatattgcctgctccgtcagggaagttagcagtagggacattggaggccagaggatatgagttctgggcatctgcttccactgtatgtagctcgtatcccattttggtcagctgtttggcggcagctgctgcaacggcccagcgtcttgggtcatactcttgattgacatagtaggctccgtcgcttttacgtttccaggtcccgaaacatttacgggctgcagctccgccattgaaaagcggtgaagcctggaagaggcgcaaacgggcgatgagtgccatggctgctcctttggtcggacgttgataatagttgacgctttgctcatccgccgaatagatgccttgagttgccagtcggaattcatcgcatatataatctacagactcatcataggtagcccgttcgcgattataatattcggcaggttcggaggtgctcagttcttcatcgcccacgataatcaacggtccccagttcatcaaaagatgataataagcgtacccacgcataaagtgaacatatccgatataacgtcttctgtccatttcattcatatcaggtacattgtagacttctttaagcattttgttacatcttgctacaatgacatacatgtcgtaccattggttttggataggcagatttctgctgttgatggtacctacggaaaattgtagtccccaaaattcatttgtctgatatttaagtgttatttcgtccgaagcagattcccccggattccaggaatttccccagatagcccctgcgtcgggaaaacctttcggagtgttccagagataaccttcagcatttttcttgctgtgaaagatggagtcttctttgaaagtagcttcgaagtatgggtctacatccagaaaattgcaggaactgagtagtagtgtacttcctactgttgctcccaatattattttgaataactttttcatgagtgttctatattatttttagaatttaagataaacctggaacgtgtaagttgccggtatcggataagcggccccgtttgcagatgcctgttccggatcaaaatacttcactttgtcgatagtaaaaaggttgttggcaacaaactccagatcgacagaagatagtcctgtcttttttatccatggagtcttcaggttgtacttcagactgagttcctgaaagcgcaggaaagaaccgttccgcttccagaaagaggaaagctgggagttgttcgtattgcctccgtaggagagacgtgggaattctgcatggggattttccgtagcggtggtgcctgaataccatgcgggcgtccatctgttcttgggattgttggccagcttgataacgttgccgagttctccgttatagaagggaatccatcctgcgtcattaccgagtcccgaacggtagtagtctacttttgccgaacctttgaaaaggaagctgagggttaagtctttccaatgaaaatcggctccgaacccatacattacccgggggagttggttggaataggacaaaggtactttgtcatcgtcattgataataccgtctccatttacgtcacgatatttgatatctcccggacgaatgcggccgaatccgctttggtcggcacttgtgttgatttcttctttactggagaagagaccttctgcaatatatccgcgaaggatgttaaagggttttccggttacactcagataatcataaggtaacttgttttcttcatagtaatcaataatattctgagagaaagtgtaattgccgcgtacagtgaagctcatgtctttattgatctggtggaagaattcgaagtttccgtcagaaccatagctatgcatttttcctacatttgatttcgggacggtaaccatacctacaaacttaggcagcgtcacacgatcctggaagatgtgatcacgtgtatcgcggaaaaagtcaacagtgacagagagcttgtcgtggaagaacttggcatcgataccaaagttgagtttctttgctacttcccattgaaggttgtcggctcctttcacagtttctgtaataccccgttcacgatatccccagtaagaggcggcattgtcattgattaatgtcaaataagggaaccggtcaccactgatctggtcattacctacctgaccgtaggagccgcggaacttgaggaagcttaaccagggaatggcctcattgacccagttataggatgtcggtacccagcctacagcaatggaagggaagaagccgaatctttttcctttttcgaattgtgcagaacctgtgtaaccgaagtttgcatcaatgaaatagcaattgttatagccataggaaacacgtcctgataagttttgacgccgttgaggaatggcattgatacccatcgcgtcatacttccattgggtgttatgaacatcttccatgtaatataaagccaatgctcctagtgagtgcaaaccaaatgtacggtcccagttggctttggcttccatgtagtattttctgtatctgttgttattttgtgtatatttcatgttctctttggcagtacgtaatgttttgatgagtaccccttgtgaacttcttcctgtagcgcggtagaggtcaggccatatgtaacgtccttcattgaaataattgatattttcgctcatcgcttgtaccgacgctgtcattcctttcaggaatcctccgaatttctgttcaagtttgagtgtaagcatattacgctgagtttcatcttgcgtgtatccggtgttatttagcatgacatacggagaagcaaggtcatgttttccataagaagggaaggtaccgtctgaataggttttaggaaacatcagtggagttagctgacggactgctgaccataccgtattcgtgttttgtccacccgggctggtatagttggaaatatatccgtccagaccaaaataaactttggttgttttggtcagattcatgtcaatattggcacgatatgttatttttttatatgacaaaggctttttgaacaggttgtcttcctgccggtaggccgctccttcatcctgataccctaatgaaagataatatctggctatgtcgcctcctccttgtgcattgatgtaatagttctgttggatagatgtgcgtttcattatttcatctatccagttaacatccgggtagaggtctttatccaaattgtattttatcagatccagttccagacgggagtaaaggtcgtcttcacccgacatggcacgtgcctcattggcaaggagagcgtagtcataagctcccaggtattcgggcagacgtttgatatgcgatacttttaatgttgctcgtcctgtgatggtaagtttgcctgtttctccacgtttagtggtaaccaagaccacgccattggcacctcgggtaccatacactgcggtggcggaggcgtctttcaggatactgaacgattttacatcatcaggatcaatgtcttcaaggcggccttcgataccgtcaatcagcactaatgcaccggagctggctccgaaagtactgataccacgaatccagaagttggagatgttttttcccggttcgcccgaactctgcatggtgatgacaccagccaaccgtccgccgatcatgttgttgagggaagtaccgggagtactgagctgggctacatcaatggtactgattgcacctactactgatatctttttttgtgaagtcatacctgtgaccactacttcgtcaagcttggtgtcatcttcttccaatgtaactttgagtgtcatttcatctttagtcaccagtttctcgatagatttcattccaatagcctgaatgactaatatttggttggcatctactttgatactgaatttaccatccatatctgctgaggttcccactcccggtgcattcttaacataaatggtagtacccggtagcggttcaccggttttgtctattacgacccccgctacagtaaactgttttttcttattgtcttgactgtaactcgtcagcggtataagcgccatgatcagtacaatcagtagaaaattatttctcatattgtattttgtataaggttattcaatggataatttacgaatcactttgttctgtgtgtcggctacatatacaatagttccatcactgttgactgctactccgcaagggaagtggaatttggcaatttccggacctccatccttataaccttccgctcccggcagaccgataggtgtggttacggctgctctttctttcggcatagtagtatctattacgcggatgcaggaattaccactgtcagcaatgtacatttttccgtcgtcggtgaaacaaatctggcgcgggtgtctgaatttggcgttcttcagcaagccgtcttcccagcccttcccattcataactccttcgtagattgcttttcctgcgtatgattctccgttataagtgtctttatcttccggagtgatcttggatacgtccactctccaaatctggtgaaaatctgcaagagatacatagagtacgttttcttctcctttaatagggctgaatgcgatataggagtcacttcctgctttgccgccgtcgcctgttgctacattagatattttctttagcaaaatttctgctgtacggtttttaggattgattcgaaccaattgccctttccacatgaccgtatagatcatatgatccagcttgttgattacaaagcaatgcttccagttgttttcgtctacggtgctgagttcttctgatttcaagactgttctatatcggggaacataatttagaagtttttgcatatcataatatttcatgccggcatcatccggaatgtaaacagcttcagcatctttttcatcagaataagccggtgcattaatatatgcagttccatattttaatacaatggaagaattgctggcgatggaaatcattgaaatgtttccgtttacgccttcacctttttcattacggcaggttgtgtttggttgtttgtcttttccactgtctcctttacggtctaccacaaatatattgtcttcaccgtctatacagagatagaaaggagaggagaaagtacatgtggcaaggtcaccaccaacggtgtttatattattgtccggtgatgcaagtcctgctaccgtactaacactggtttgtgtcttgtataggaattggtctggtgctttgcctatgtattcttgaccgtcgggcgttcttctttctacaagaatattcatctctcttttgaaggtgagtcctttgggaacaaatgcatagattctgctaccgttactgctgactaatccggcaggatgtctgatcccgtctacatcttcaaaatagactttcatgccagtggtgtctgtaccgaagttgcggccttcgatgatcatcggagtggctatacctccggaatcaggataaaattctgtaatctcaataggctggtttgggttgaacccgctgcttccattgatgtcgtcatctgaacaggaagctaaccacgcgaaagctgtaatgaacagcgtccaataaactcttctttttcgcattgtttttctgtgataaaaggttaataattagattggttaaaaaaaagtgatagggaaacctactcttgtgtgtctactatgtgggtagaactagggtatgcatacaaggggtatacgtttgtttttgtatgtatgagtaagtttgaaaatatatgggtgtgtttgactgctattattcatcttcttaaattgggggtattgaagttgataatgaactcagaatacatattatacctattctgatctgtgctgaaataaaagtaaagaatgagatcaaattctccgattttgaaaggcggagggctgttgctaagagttttcataaatgttaatttaaggttgtaatcatattgattaattggggctaagtcgtaataggacttggtatttttataccccaaagtatattttctactgtttccataggctattcaaaggttattaagtgcatgtactattctaagacggtgtaaagttattaataaaatcgaaaaatacaatatcttttttattttaattatcaacaaacaccatttttttagaatctcaattctactatatagttcataaattgtcatcccaagcattcatcaaccaattaatcaattatatataagacacttatatacacacataccaagtcctattacgacttcttcaaaattattcaatttggcataaggtctctattgctctccaggatgaaaagtaatgcaattaatttaaataattaggtcgatttttcctttgaaaataattagaagactgttcttttgacttttttctaccttatatatattagattgttctacccaaactgtcaatctcttaaagtagtttttgagcatccggaatcagaatctcttttctgtgcaactcgattaaaccattatcctgtagttcattcagtgttttagaaatatttaatcgagtatcatccaaacaacgcgccaaatcgtccatctttactttgaaagtcttttccccttgcggtttttcgcaatgtgacagaaagaaacggataattttgctttttaaatccagcgtgggttcatcccataaacgggaatagagattttgcgcccggttgctgacgatattcatatagttgaggcggaagatgtcatatttgaacagatcactgagtacgaatgctttgctgatgcaaacagtatgaacttccgtatgtgccacataagaagaggcatagttggtattcataccgaataaagactgaggttctatcagatagggagcttcgatttgttcgatgaccgtataaatgttttcttttgcattggtgacaatagaaatctcacctttcaacagaaaacaaagttgggtacagggattaccactctttatgatggtttccccagctttatgtttgataaagtgcagcttgactttatccagaatactagtgaaatcttcatgacaaagcccctgaaataaaggtaattggagcaaagtatcgaacattgtttccatacgttgtaatctcttattaatcgtacaaatttactcataatacaacactgctatccacatatcccctttctttttgttttttttattgtttgaatgcataaaaatagagtatatttgcaaaaaaaaggaggaattatgttcacgggttttaattggcagcaaatgatcagtgcgtttatcgtactttttgcagtaatagatattatcggctctatacctattattattaacctgaaggaaaaggggaaagatgtgaatgcaacaaaggctactgtcatctcctttgccttactgataggcttcttctacgcgggtgatatgatgctgaaactttttcatgtagatatcgaatcattcgccgtggcgggcgcattcgttattttcctcatgtctctggaaatgattctggatatagaaatcttcaaaaatcaggggccgataaaggaagcgacactcgttccgcttgtcttcccgctgctggcaggggccggagcttttactacgcttctttcgcttcgtgccgaatatgccagtgttaacataatcattgccttgatactgaatatgctatgggtctactttgtagtaagcatgaccggacgtgtggaacgtttcctcgggaaaggggggatctatatcatccgtaagtttttcggtatcatcctgctcgctatctcagtaaggttgtttactgctaatatcactttattgattgaggcattgcataagtcgtaaccgggatttatgaggtaatatccgtagagtcggttgtattgtgatcgttgatatcttcttccggagattcttcttcttcatccgtttcgtccgcaaaaggttccggtcgttgaggtccgtggttcaagaaaccgaatgcacagagtgttcccatgattcctccgctgagatgtccttcccatgacatgttggcgggagagaagtaggggaacatatgccagatgattcctccatacaaaaaggtgacaagcagtgagatggcaatcagaggaacatatttccgcaggataccactgaaaaaaagaaagaaggcaagtccgtaaatcagtccgctggcaccgatgtgccatcccggtttgccgataatgaaggtcagcagtccggctccgatccagatgatcataaaaatacgtccggctatccccctgtagaaatagaacaagcaccatgataaaaaaaatagcggcaacgtattggccagcaaatggctgaacccgctgtgtatcagcggatgagtcagaatacccgttattcctcgcttttccagagggtatattcccatgtgagagaagtcccagtccatgccgacttcaacgatctttagcagaaataggataaaaattaggaacaacggcaccgctgtagccagcatgatacgctgaatatctcgcttcattactttctattctttagatattttacgcaatactacgaatatttgcacaaaaactgaaaataaaaagcctttttatttttgtttttatctagaatttgtacatttgggcattatacctatatatacaatgctcaggctggtatatatacagaacagcaatagatatatataaggaatatagtgaccaataattaacctttaaataatgcacaactatgagttatttacgatttgacaagaccctcatgacgaatctggaagaaagtctccaaagggagattctccggacgaacaaagcaggagcttatcattgtacaacgattgttgattgtaacacacgcaaatatcacggactgttggtaattcctgttcccaatatcgacgatgaaaatcatgtgctgctatcttctcttgatgaaacggtaattcaacatggtgctgagtttaacttggggttgcataaatatcagggaaacaactttagtccgaatggacataagtatatccgtgaattcgattgtgagcatatcccggcgacaacttaccgtgttggaggagtagtgttacgcaaagaaaaaatctttgtacatcatgaaaacagaatcctgattcgttatactttgttggacgcacattcggcgacgactttgcgcttccggccgttcctcgctttccggagcgtgcgagagtacactcacgagaatgcgcaggcaagccgcgattatcagcttgtggaaaatggtatcaagacttgtatgtatcccggttatccggaactgttcatgcagttgaacaaggcttgtgagttccatttccagcccgactggtatcgtggattcgaatatccgaaagaacaagagcgaggctacgacttcaatgaagacctctatgttccgggatattttgaagtggatataaagaaaggagaaagcatcgttttctctgcgggtacttccgaagttactccgcgcagactgaagcagacgttcgaagccgaagtggctgaccgtacgcctcgcgatagcttctatcactgtctgaaaaactcagcccatcagttccacaaccagcaggaaggagaacattatatccttgccggttacccgtggttcaagtgccgtgcccgcgatatgtttatatccttgccgggactgacacttgcgctggacgaggtggatcagtttgaagatgtgatgaagacagcggaaaaagcgattcgaagcttcatcaatgatgagccggcaggatacaagatttacgagatggagcatccggatgtactgctttgggccgtatgggctttgcaacagtatgccaaggagacctctcgcgaacaatgccgtcagaaatatggcgaactgctgaaagatatcatcgaatttatccgtcagcggaaacatgagaacctcttcctgcatgaaaacggtctgctttatgccaatggcaccgataaggcgattacgtggatgaactccaccgtaaacggacatccggtgattccccgtacgggatatatcgtagaatttaatgctttgtggtataatgcgcttcgtttcgttgccgatctggttcgtgaagatggaaacgttcttttggccgatgcgcttgacgcacaggcggaagtgacgggaaaatcatttatcgaagtgttccgcaacgaatatggatatttacttgactatgtagacggaaatatgatggactggagcgtacgccccaacatgatatttgctgtagcattcgattattctccgttggatagggcacaaaagaagcaagtgctcgacatagcaaccaaagagttgcttacccccaagggactccgtaccttgagtccgaagagcgggggctataaccctaactatgttggtcctcagatacagcgtgactacgcttaccaccaaggcacagcctggccttggctgatgggattctatatggaagcctatttgcgaatttataagatgagtggtctgtcgttcattgaacgccagcttattggtctcgaagatgaactgacaattcattgtatcagttcgttgcctgaacttttcgatggtaatccgccttttaaaggacgcggagctgtatcgtttgccatgaatgtcgccgaagtactgcgtattctaaagctactgtctaagtattattaaaaagaggaggaacgaaaatgaaagttttaatgtttggatgggagttccccccgcatatcttaggagggttagggactgccagttatggtctgacaaaaggaatgtctcagcaggatgatctggagattacattctgtattcccaaaccatggggagacgaagatcagagctttttaagaattatcggcatgaacagcacgccggtagtgtggaaaaatgtcggttgggactatgtgaaaggacgcgtaggcagttatatggatccgcaattgttctatgacttgcgcgatcatatctatgccgacttcaactatctcaatacgaatgatctgggatgcatcgagttctccggacgttatccggacaacctgcacgaagagatcaataactattcgatcgttgccggggtggtagcacgtcagcaggagtttgatatcattcattctcatgactggctgacttatccggcagggatacatgccaagcaagtatctggtaagccattggtgatccatgtgcatgctactgatttcgaccgtagtcgcggcaatgtcaatccgacagtgtatgccattgagaagaatggtatggacaatgccgaccacatcatgtgtgtgagcgaactgacccgtcagactgtgatccataagtattttcaggacccgaagaaggtgtctactgtgcataatgccgtttctcctttgtcacaagagatacaggatattgttcctcaaaagaatccgagcgaaaaggtcgttactttcctgggacgtattaccatgcagaaaggaccggaatactttgtagaggctgcagcaatggtattgcaccgtacgcgcaatgtccgtttcgtaatggccggtagtggtgatatgatggatcagatgattcgtctggtagccgaacgcggtattgcggaccgtttccatttccccggttttatgaagggaaagcaggtgtacgaagtgctgaaagccagtgatgtatacattatgccttctgtatctgagccattcggtatctctccgttggaggctatgcaatgtagtgtaccttccattatatccaagcaatccggctgtgccgaaattttggataaatgtattaaaacggactactgggatattcacgctatggcggatgccatttattctatctgtacttacccggctatgtacgagtacctgaaagaagagggtaagaaagaagtggatgagattaaatgggagaacgtgggatataaagttcgcggtatctatgatgaggttattaaaaattatggtaaacaataaaatgatatagactatgagaacgatctgtctttatttcgaaatacatcagattatacacttgaaacgctaccgttttttcgatatcggcaccgatcattattactatgatgactatgcaaatgaaaccggtatgaatgaggttgccgaacgatcttatatacctgctctcagcacgttgatcgagatggtgaaaaactcgggaggagctttcaaagtggcgctttctatttccggtgtggcattggagcaacttgaaattcatgctccggcggtgattgacttgctgcatcagttgaatgataccggttgttgtgagttcctttgcgaaccttattcacacggcttgtcatctttggctaacgaagactgcttccgtgaagaagtgcttcgccagcgtgataaaatgaaacagatgtttggcaaagaaccgaaggtgttccgcaattccagcttgatttattcggatgaaataggtggactggtagcttctatgggctttaagggaatgctgacggaaggtgcaaaacatgtattgggatggaagagcccgcactatgtatatcactgcaatcaggctccaagtctcaaattgctgttgagagactttaaactttctgatgatataggattgcgtttctccaattcggaatggccggaatatccattatttgctgataagtatattaactggattgatgcgttgccacaagaagagcaagtgattaatatctttatggaattaagtgcattgggtatggctcagccgctttcttccaatatcctggaattcctgaaagcattgcccgaatgtgctaaatcaaagggtatcacgttctctactccaacagagattgtatctaaattgaaatctgtatctcaactggatgttccttatccaatgtcatgggtggacgaagaaagagatacaagcagttggctgggtaatatcctgcagcgtgaggctttcaacaagttgtatagcgtagcagaacgtgttcacctgtgtgacgaccgtcgtatcaagcaggactgggattatctgcaagccagcaacaacttccgtttcatgactaccaagaatacaggtatctggctgaatcgtggcatctatgactctccttacgatgccttcactaactacatgaatatcttgggcgactttatcaaacgagtagattcactgtatcctgttgatgtagataatgaagagcttaactctctgctgactactattaagaatcagggtgaggagatagccgaactgcaaaaggaagtaaccaaatggcaggcaaaagctgaaaaaggagctgcaaaagctaccaagaaagtagctgcgaaaaaggaaccggtagctaaagctactcgcaagaaagctactgcaaagaaagaagaataagataataataaattaactggttgtaaccgtggggagatgggaatcacctcacggttgtttttttatattgcgatgttatattggaatgttatataggaatgggattgtccgaaaagggcttgtttgctattaattccagtgacaggtacatataaaaaacagcgcgaattaccgaagtaacccgcgctgtttattttatatatctttttagtttgacttagttgttaatccgaagtctgtagaaataacttcaagtttcaacttgtaattctcaccacctggattttctccagcttctccacctttcagacgtacataaccaggttttaagtcatgttgtattctaataatattagcctgaccggttgtagtgtttgaagagtcataagtcacaagtacaggtataagtactaccttattccaatctggatttttttgtaaccagtcagcttcattccattcactaccctttgctttcttagcctcttccttttctgcaatgcaggcatttaccaatttggtgatgttgctgaatacatattgatttgtactacttgtatgtgaagttagataagaagatacaccatcgctcaacttattgtctttaaagaagctatcctggaatttcttgcgtacaagcattacagtagatggtatagacataccaaacttcttgtcacttgattgattgtaattagtgaatgtcagttttactgcatttaaggtatcgccagttaattcgttctctatgtcagaaattggtaatgtagcttcagtgaatatacctgccggactttttaaataagtacaggttttttcatttattctttcattaatggcttgttcgtcattacttaattgattagcctgaataatttctctggtagaagcaaattgacgccaagtataataggttgaatcgttaactccatcttgcttttttaatttaatgcctgtgatggaatctgtagcataacatttgtatactactctcatttgtacttgatctacataaagtactgttccgtcaccataatcgctttttacgtaaatccctggaaaggcttttccaaataactgattattaaatttttttccagctgctcttgatgcttctagaatatttttgcccacttctttagctctgtcttctttaaaagcaacgtgaatatagggtacgtatgtacttgaattacggtcttcttcagatagggagtagtctacggctgtataagcttttgttcctaaaagattctggctatcatagaattcttcaggaataatatttgtataatacgcattatctgtgtttagtgtttctttattatctccacctaattcataaacactcaatctacaagcagtcagtgagtcaccgaaatagttatcatacaataagaaaagttcggtagtacgtatgttgccaataggattaccttggtcatccttaatgatttcaatcgtttcgtcatcttcattagttataaccatttttcctgtagctgagataactttaccgctagcatctttcttttctgtatatacttcaggaaaagttaagccatccggacaattcagttgagcaaggaagcctgcctgataagtaccgaatgtttcatcagtgaactttccaacatatccgatgttggttttggcatagatctttccagtaggaattgatttagtagttacatcaaacgtggataactttcctttgatattttggtcattgcccgggaacattcctaatcccagtccgcctgtattatcatcgcatccgaaaaatgtgattgccaataaagctatcaaggcatattttgctttcatgattgtcgtatctagatttttattcttcttctttatttgtagtggtttcccatacctgatcgtagaattcgttgcaagcgtttgcgtagttttccggatcctgataatcaagtaccagtttgcctgattggcgggcgtactcaatgattgattcgtctacctttgcgctgttttgtatgattccgtcagaataatcaacggcaagtttacaaagtgccgcatagtctaccggttccttcaaaccagccaaatccttcttggtgatgcctttcaacatcagtttggttgcaaagtcctcactgagcgtattcttgaaatcatcttcatataccgagaatacaactttggcatcacggaacgatggttcgtccttgtaggccttcttaatataaagaggagccaatgccgtcatccatccgtgacagtggataacgtcgggacaccagcgaagcttcttcactgtttccagcacaccgcgtgcataaaagatagcacgactgtcgttgtcatcgtattccacaccattttcgtccgctgtctgcaagcgattctggaaataatcatcattatcgatgaaatatacctgcatacgtgcggattgaatagaagcaacttttataataagggggtgatcagtatcgtcgatgatcaggttcataccggagaggcgaattacttcatgcagttgatttctgcgttcgttaatgtttccccatttaggcataaatgtcctgatttcacggcctttttcttgtattgcctgtggaaggtttctacctatattggccatttcggattctgaaacgtaaggtgtaatctcttgagtaataaataaaactttattcgcctttgtcataataacaatagttcactataatattctgcaaagatagcaaaaaaaaggaactttaaataccatattctttctttatgtggcaaatattagtttattttgcagagtttttgcaaacgaccaaaacataaaccaattaacaaaaatgaaagtaatacacactatcaaggacttacaggccgaattgacggcactgagagcccagggtaagaaggtaggactggtacccacaatgggtgctttacatgcaggacacgcatcactggtaaagcgcagcgtaagtgagaatggtgtaacagtagtgagtgtttttgtaaatcccactcagtttaacgataaaaacgatttagcaaagtatccgcgtacattggatgctgactgccgcttgttggaagattgcggggcagcatttgcctttgctccttcggtagaagagatgtatccgcagccggatacgcgtgaattcagctatgctccgttggatacggtgatggaaggggctttccgtccgggacatttcaacggagtttgccagattgtcagcaagttgtttgacgcggtgcaaccggatcgtgcttatttcggagagaaagatttccagcaactggcgattattcgggagatggttcgtcagatggattataaactggaaattgtaggttgtcctatcgttcgtgaagaagacggattggctctgagcagtcggaataaacgtttatcagcacaagaacgtgaaaatgctttaaatatttctcagacattatttaaaagtcgtacctttgcagcatctcatacagtgagtgagacgcagaagatggtagaagaagcgatagaggatgctccgggattgcgtttggagtattttgaaatcgttgacggaaacacgctgcaaaaggtaagcagttgggaggattctctgtatgtagtaggctgtatcacagtgttctgcggagaggtcagactgattgataatatcaagtataaagaaatctaaattaaaaaaagacgaaaccttatgatgattgaagtgttgaagtcgaaaattcattgtgcacgtgtcacagaggcaaatttgaactacatgggtagtatcacgattgacgaagacctgctggatgctgccaacatgattccgggagaaaaagtgtacatcgctgataacaacaatggcgaacgctttgaaacctacattatcaaaggtgaacgcggttccggtaagatttgtctgaacggtgctgccgcccgcaaggtgcaaccggatgatattgtgattatcatgtcgtatgcattgatggattttgaggaagcgaagtcgtttaaaccgaccgtgattttcccggaccctgcgacgaatagcgtagtgaagtaagaagtatcttgtgataagaaagccccgtttgcattcagcagacggggctttctgttataataaggtggtccttttacttgctttgcagttgttcattcatggcagcagcggctttacggccatctcccatggcaaggattacggtagctcctccgcgcacaatgtctccgccggcatagatcatcggaatagatgattccatgttgtcatctacggcaatggttcctttgcgtcctaattccagtcctttaatggaactcggaacaatcgggttcggagatacaccgacactgacgatggccagatcgatatcgattgtttccgtagctcccggaatggctacaggactgcgacgtccggaagcatccggctctcctaattccatcttctggagaatgacctgtttcacgcaaccttgttcgtcggcaatatattcaatcggattgtgcaatgtcaggaattcgactccttcttctttggcatgcttcacttcctcgatacgtgcaggcatttcttcttccgaacggcggtagatgatcatagcacgttcagcacccaggcgtttggctgtacggacagagtccatagcagtattaccaccaccgatgacagccacatttttgccgaaagctaccggagtgtcagagtcttcgctcgcagcatccattagattgacacgagtgaggtattcgttggaagacatgatattgatcgagttttcgcccggtatattcataaagttaggcaaaccggcaccggaagcgacaaatattcctttaaaaccttcttccttcaaatcttccacactgattgtttttcctacaatgcagtctttgatgaaagtaacgcccattttaacgaggttgtctatttctacatctacaatcttgtttggcagacggaattccggaataccatattttaatacaccgccgatttcgtggagtgcctcgaatactgttacatcataaccgtattttgccatatcacctgcgaatgataatccggcaggacccgaaccgatcaccgccactttgatgccgttcttttcggcaatgacaggtactgaaatttgtccgctttcacgttcgaagtcagcagcgaagcgttccagataaccgatagctaccggtttttcattcatcttcaagtgtatacatttggattcgcattgcttttcctgtgggcagacacgaccgcatacagccggaagcgcacttgtctctttcagtgttttggctgcttcgaggaattcgctacgctcaatgttcttaatgaagcgcggaatgtcgatacctaccggacacccttccatacatccagggttagcacagtccagacaacgcttggcttctgtaactgcttgctcagcggtcagaccctggtttacttcttccttgcggctatgtgaacggtattcggcatcgagttcgttcatctcgacacgtggaatagctgtacgttctttcggtttcatcgatttgcgcagttcctgtctccaggctgcgttgcggcttttctcatctatctctttcgttgcttcacattcgggctggagtttgttcatctcttcacgctcaatttttttgaacgcacccatacgtttcagcatttcatcaaagtccacctgatgaccgtcgaattcgggaccgtcaacacaaacgaacttcgtttttcctcctaccgtgatacggcaagcaccacacatgccggttccgtctaccatgatggtatttaatgaaacgtcggtaggaatctcatatttctttgtcagcagacaaacgaacttcatcatgatagcagggccgatggcgaagcatttatctaccttttcacgtttgatgacttcttccacgccttcggttaccagacctttacgcccgtaagagccatcgtccgtcataataatcacctcatcggagctttcgcgcatttctttttccagaatgataaggtctttgttacgtcctgccaatacagtgatcactctgtttccggcagctttcaaagcctgtacgataggaagcatcggagcaacacctacaccaccaccagcacaaacaactgttccgaaattctcaatatgagtagcttgtccgagcggacctactacatcagtgatataatcaccttcgttcaattcacaaagacgggtagaggagagcccgacttcctgtatcaccagagtgatggtgcctttcttcaaatcagaaccggcaatcgtcagaggcatacgttctcccttgtcgcctacacgtacaatgacgaagtggccggctttgcgggatttagcaattaaaggagcttcaatttcaagtttaaacactttctcagaaaagcgttctttgctaatgattttgttcattatctaattaatttgttggtattattacgtaactgctatcagaatgttataaatttcggcaaagatacggcttatttacgaaatataaaaagaaaagtcactcttttgatgagtgactttccatatccatgtgaatatctttatttatttcgttctgattttgtatccggctaccccataatatagaataaacaggaagcagggaaggcaaatccaatatgctttctgaatatcggaaatgtctttcagatagccaaataaggtcggaataacagcaccgcctgccattgccatgatcagaagagatgaaccggatttggtgaactttcctaaatctgccatagccaaaggccatagggcaggccacattaaagaacatcccaatgccataaatgagatgaaatagatggatatatcggcaggtgtaagtactactagtacggaaccgatgatagccagcactgaacaaatcttcagtgctgtagcctggctcatatatttagggatgaagatgatgccgcagatgtaaccgatcacaatgcctatcggagcaatccaggcatacattgctgcattttccaaatgaaggctggtggcataatctactaatgtacccagtgatacggtttctacacctacatataagaagagagcaagacatcctaataataaatgcgggaattgccagatggaggttttctttgcggcgtacggacaggcttcggctgcctcttcgctgtcgtcttcaccgacggctttgacttccggtaggggagccatgtatgcgataatacctagtgcgatgaatgcggcgataataacgtagaatggcagaaacaggtcagctactgtaatatcggtcacttcttttccgattaggaaagccaggaataaaggaggaatcggccatgcgagtttgttgcatatacccataatgctgatacgtttggcagcactgtctatcggtcccagaatcgtgatatacgggtttacggcagcttgcagataagcgttggcacttccgctgataaaggaagccaataaaaacagaggaaaactttcataacttgccgatggtatgaaaagtccgaaggctatggcaaacataaggaatgaaaggaccattgttcgtttgtatccgatttttttgattgtaaggcttgccggataaccaaaaataaggaacgggatgaaagtggcggcaatgatcagatatgattcggccgaactgatttccagtgatcccttcaatacggggactaatactgagttgataccaagggcgaagcccagtgaaaagaacataacgccaatgaatgccaatggcaatacgaaactttttgtgttttttgtcatgggggtaaatgtgttaaaggttaataaaggaaactcctgtaaggggcagagatatctcatccttacaggagtagaaagtttcttagtctatcatgtcgaaatcgcagtatggaaccaatgctttaggaattctaattccttcgggggtttgattgttttccaataaagcggcgacgatacgtggtagtgccagtgctgatccatttaacgtatggcagagttctgttttcttttctgcactacggtagcggcatttcagccggttggcctggtaagtgtcgaagttagatacggaacttacttccagccagcgtttctgtgcttcggagtatacttcgaagtcgaaacaaagcgcagcagtaaagctcatatcaccaccacaaaggcggagtatacggtatggaagttccagtttctgcaacaggccttctacgtggtcaagcatttgctggtgggattctttagaatgttccggcttgtcgatacgcactaattctactttggagaattcgtgcagacggttcagcccgcgtacgtctttaccgtaagaaccggcttcgcgacggaaacattgtgtgtatgcgcagttcataatcggcaactgtttttcttccaggataacatcacggtagatgttagtgacaggtacttcggctgtcgggatcagatagagatcatctacttcgcaatgatacatctgtccttctttgtcgggaagctggcctgtaccataacctgaagcggcattgactactgtcggcggcatgatttcagtatatccggatttgcgtgcttcgtccaggaagaagttgatcagggcacgttgcagttgggcaccttttcctttgtatacggggaagcccgcacctgtaatctttacacctaggtcgaaatcgattaaatcgtattttttagccagttcccagtgaggcagtgcatctttgggaagttctgtttccatgcctcccatcttttctacgacattgtcttcggcacctacgccttcgggtacgctgtcataaggaatgttggggatcgtataaagtacattctgcatgtctgtagcagcctgtgtcatggtagcgtccagcgctttgttgctttctttcagttcggcaacacgtgcacgtgcagcttcggcttcttctttctttccttctttcatcagctgaccgatcgtgcgggaaagtgaattaacctctgccaggttcttatctaataggttttgcgtagtacgtctcttgtcgttgagggcgatgacttcgtcaatcgtctcttttgcattcttgaaatgcttcttttccagtccgcggagtaccgcttctgtattttctgtaatttgtttaatggtaagcatatctatactttttatgaactttctttattaaggctacaaagataaagaaaaaacgaataagcgagcaatgaaaatctgcataaaaaaagaaaggagatgcaatcctttggattacatctccttttcttgaatattttcagttgtacaggttatgcttctgttgcttcagcagggatgatagaaacatatcttctgtcttctctacctactttaaatttaactgtaccatctactaaagcgaaaagagtgtggtctttacccattccgatgttttcacccggatggaattcagtacctctttgacgaatgataatattacctgctttgcaagcttcaccaccaaatatcttaacgcctaatcttttgctatgtgattcgcggccgttcttagaactaccgacaccttttttatgtgccatttcttcttactttttaaatgattaagctactacttctgtgattgttaactctgtgaactgctgacggtgaccgttcagttttctgtaaccttttcttcttttcttgtggaatacaagaactttgtcacctttaaccaagtttgaaataacctggcaaacaactttagcaccttctacagtcggagcacctacagttacgtttccgtctttgtctactaaaagaactttttcaaattctacagttgaaccgttttctgcaccttcaatgtggtgaacgaacagtttctgaccagcttctgctttaaattgctgaccgttaatttctacaattgcgtacatcttatatataatgtataagttagctccggcgggtggtctttaatcacttaaagagctctttatcgaacccgttgcggaataatcgggcacaaaagtacttcttttatttgtttcagacaaatatttcctttatttttttgctgttgtaacagaagataatcagatatatagcaaaccggataaattctccataataaaccggtggggatatgctctgagttcgtcagcggtagtcattccattaaggacacctgcaaaatctactcccgcattttgtgctgtttcggcatccacagtactgtctccgatgtataaggtttcttgcggagtcctgcccaagtgttcgagagcgaattttattccttccggtgaaggcttggcagcttgtacatcttctccgcctaccactatgtcgagaaagttttccggcagatactcatccagaaaactaagtatacggaaacggtatttagtagagataatgccgatgcgggcacctcgctcttttagttctttcagagtagagagtgtatcaggaaaaaggcgggtattcacgttcatgtgaacatccgcttccagtctgtactcttgtcgaaaagcggtgagctgttcccagtcggtgactccggtcagtatgctgaaagattcttccaatgttttaccaatggtacgtttgatcgcttcgtcagtgacattcgtatattggtgacgattaagtacatttctgaaacaagtaacgataccccgtgatgaatcggctagtgtatagtcgaaatcgaataaataagttttataattcattattttactgcttctactgtatatccctgttttttcagtaagcttaataagcctttattacccggcaggtgcaaagcgccgactgcaacgaaggtaggagcggctttcatgatagccggtagtttctgtgcccatgttttattgcggtcgtaaattagggcatcttcttctgtgggaagtgcatcacattgatttcctttacgctcttcgttgattttcaacatggtttccaaatcttgtttcatgtaggcatctgtcagtcttttgaggctttccacctctttgtcgatgttattgagggtacacatgagcagttgggcttggcgttgcagggaaattccattgtatagcaggttaaactggaaatccggagtttccagtccatccactttttttcctttttgtgttgcctgagtctggaaataagtatcgagctgttcttgcggattatagtttccgatgtgcttgatgtacgccactactgctatgttgttcagtaagaaagccggtttgattttgggtgccatgttgaggtccatcatcaggttctccttgcagaatttattagcggtttcgtaatcttccggtgagaggagggtagtcagagtcgtatcgctttctatcatcatcattttctgcatcttctggatggtggccggagactggatatccgacattttcagttctccatatacctgttgtgtttcatccatcgctttctgtagtccggtaatgccgtctttgacactcaacggagcgagatggtgagtccccataatgtatgaagggctgctaagtccgttaccagatactttccataaaagctgtgcgtttgcgcttaacgctacgcagataaatatgactgctccaataaacgatttcatgattctatatgtttttaagttgataatcagcgtattcttcctccggatatccagtgtctggtgtaatagtcttcgctcagtcgactgacaatcactcctttgctggtactggcatgaatgaatttcccatttttgagatagatacctacgtgagctaccttttttcgggaacggctactgctgaagaataccagatcgccttctcgcaaattccgtttggcgactttggtactttcttttctcaggtcttcggtatttcgcggaacctgagtacggtatactttccggtatatctggtaggtgagtcccgaacagtcggtaccgcgttttgaatcgccgcctccacgataaggaacaccaatccattcggccgattccagatagagtttgtggttatcttccatattgatgtccacgcccagcaggatggaggcgcgtgccagtgcctggtaatccagacggggagcagacgtgcggcaggaactaaggataaagatcagtcctgtcagtatgaagattagtttgaagttcactcccatcggctatctttcttttcgtatatcgtaaaattataagtaactttattcttctacattgaagtagtcttccagttctttttcagctgaattattctcattcataatatcccggatgatgacgccattctccagcagggcaatacgcggacatacatctatcgtatgattcagattgtggctggaaatgattacagttgcattatgctcttcgctgtactttttgagcatatgtttgataatggattgcgaactgggatcgaggaagttgaacggttcgtcgagtatcagcaactgaggataatgaagcatggcggagatgatgccgattttctgtttattaccggctgagtagttacggatcagtttcttttgtccgatcacttctccgctcatcagacgttcgaacggcagaaggcgttcgtccacctcttcttttttcagtccgtacattttcccgataaaatagaaatactcttccggggtaaggtagtctatcagaaatccatcgtcaatgaaagcacctgtgaagtttttccagtcttcactttgactgacgtcaatttcgttaatgacgacattcccattatccgctttcagtaagtcgagcatcaaccggaaaagtgttgttttaccggcaccgttgtttcctaccaatccgagcatatcgccttgattgatttcatagtgatctatgttcacggctaacttttcgccgaatttcttttgaagattattgatgcttatcattgtcttggtatttttatcgtaaatgattaatcggttcaatcgtaaatctcttattggcgactgtctctgaagccttccatattctcgtatctccgtttcatgaaacgcttatagacgtttctgatccaaagcggagaagtcagtgtgaatccaagcccgatggcgaacaggatagagtaggcggccgtttcacccagaaacgcattcaacacagaatacaggatcaacgggataccgaaagctccgaagttgacaaccatttgtatggcgctgttggtctggcggcttgtcactttctcgttcagtgctacggtctgcttattgtaaacagccagttggaagaaacaaaaatagataaaaccggtggtatagaagaaccaggcaaagatacccagtaagggaactttatccattacaatggcgggaatcatcaggacaaatgggacgatctcgccgatagtatagatataatattttgctttcagcagactcatgatggattctttgcgggacattagtccatcgatgtaattgccttcgaaggacatgagttgcgaaaggatgatcatgccgaatacggcaaagttgtaaacacagataaaggtagtcatggtgctcgtgtcataaaggcttgaaaagctcaacaggcaggagaaggcgatgactacaaggagaacattgcgcaatgcacctttgcaacgccggttgcgcaaaagcatttttaattccaaccgcatatattcaccaacttctccgtatcgctcgaagaatttgtattctgaaacatgcttgatgcgggtatcatctacttttgccaattcggcgtagatgaggccggacatgattttgcggttaatcagccataagatggctatgacaagaatggtaccgaggaaacagagaatattcccgttgatatatccgtcgcccaggtccataaagaagtagaacaggggactgtcttcgggaataaaggcaaggcagcccagtccaccgtagaaagcgatggggagcagcacccaccaaatacgttcattgattagtgtgcgacataacaagtaccagtaattgttggcaacgatcaaaagccagatgcctatgagataggtgagtacacctgagataccgaaatatttggtaatggtaatgaaggaaaaggggacgaacataaacaaccagaacaggttgaacagactaagtcccgaacggataagcaggaaatcgatgatccgatttcgtttaaccggcaacaggaggtaaggttttacctcctgcgtcggtgtcttttggaacggaatacgcaagaggaagtcaagtgccagaataaatatcagggcaacggcattcattacatgatatggttcccggttgggaaccatatctgcaaaaccgaatgcaaacgtcgtaccgaagaatatcaggtatcctgcccaaaaagcaaccccgatatatccgaatattttggcaactttgttcttttcatacatcggatgccgtttggaggcgagccgtccatgtttgcgtaattcgttaaatatcatcatactgttggtatgctataaaagtttatttagcttcttcttcaggtacggtcatgatgacttggatttcgttgttctgtttcatcagcttggcaaggaattcctgtacatcttttgctgtgatgctgttgaccaacgtttcatagtcttttgtataatcgatacctgtgtagaaatactcatccagattgcccagccagtagccgttttccttttgggcgtctttgtattttttcagcatatactctttgatcttctgcatgtgttcggcagacggaccttctttggccattttttccaactgttcgatgacgatgcccgatagtttgtctttcttggccggatcggtctggaatacaatctgaagcacgagttgttctttcggatatttggtgaggcttccgctgcagcttacgccataagtaccgccttctttctcacggatttctgcggtgtaaaccatatccaatgcctgatcgaggatgctgagagtaaggttgttgcgtaaatcatatttgcaagtaccgttgaacaggaacatgatggttgccatcggtgtttcttgtttcttggcaaactcgttcttgtattgacctttgcggatttccatcttcgtatctttgaaagtctctttgcgattgatagatggcagaccacccagatatttggcgatcatcggtttcattttctcaacatcaatgtttcctacaaagtagaatgtaaagtcgctcgcatctttgaaacggtctttgtacatttccattacacggtcatagtcgatcttgtccaccatgttttctttcatgctgaaagaacgtgggtgattgccgtacaatgcataagagactgtatcactgaatgcggtcatcggattagcgtcagcattctgcaattcggctttcatgcggttcttgtatgattcgaatgcttcgttgtccttgcggggagcagtgaaagtcagataagtcagctgcatcattgtttcaaagtccttcggagaacaactgccggaaaccgtttctgttgttgcgctcacaccggctcctacagaagcacgtttgcctgcaagtgctttactcaaatctactttgctgaagttaccgataccaccaaccattgctacgctgttgatttgagagatattcagaatctctttgtcggggaactggctgctaccaccaaggctggtacctttcatcagaatctggtcagctttatagtcagttgttttgatatatactttcacaccattggacagaacaagttttgttgttccgtaaatatctccggctttttcagaaacgatctttccgcctttcggctcttctttcagcaatggttcgttagaaactttgtcttcgtaaggcttcagatcgaaagatttcatttgtttcagcaaagcagcgatttcttctttcgtcgggtattttacaccttccttctccggacctgccaacaggactacctgattgttgtcagtgatcagctgttgcatcacttgattgatagccgctaccggaatgtttggagccagctgattcatcattgcatattcgtattcaatgcccggcatcggttcattgtcaaggaagttactgatgtattcgttgacataagtgtcatttttcatcttttcgcgttcattgtaagcagattctacgcgttgcagatagttggcacgggcacggtcatattcagtttcggtgaatccgaagcggcgtgcgcgttcagtttcttcgagaatcgttttcatggccagttcgataccatcgattttgctgctggcgtctactccgaaagcactttttgtcttggctacgaagaagtcgccataacctgcacttgcacctgtaaaaggaggattcgcttgctgacggatttctgccaaacggctgttcagcattgtaactcccatgctaatcatgtattgaatgccgtaatagttgattgtattcttcagtgaatccgggaaggcttcgctcttgaagaagaagctgatggaaggagtttcgatttccttgtccgtaccgataaagatttgcggttcctgattgtctgctaccggatagtagatacgttcagccggattcaccggagctttcacgtctgcaaatacctttttcaactttgcttccatttcatctacattgatgtcgccgacaatcatgataccttgcaggtccggacggtaccatttcgcatagtagtcacggatgtcctgataagggaaattgttgattacatcgaggcttccgattggcatacagtctgcatatttggaatccggatacatgacaggcagggcattggtcatgatgcgctgcataccactgttacggcttctccattcttcacggatcacaccacgttctttgtcgatttccttgtcggcaaggttgatggcgcttgaccagtcgtgcaggatcagcagacaagagtctactacactgacgttgtcggtaggtacattgctgattcggtatactgttttgtcgatactggtgtatgcattcaggtttgttccgaacttgatacctttagtctcacaccaaggcacgatgcccagtccggtttcatcacccgggaagttttttgttccgttgaaagccatgtgttcaaggaagtgagccagaccgcgctgttgcggctcttcaaggatggaacccactttctgtgcaatgtgaaattcgacgcgtttttctgggagtgcgttgtgtcggatgtaataagtaagcccgttgtcaagtttacctatgcggacatttttgtccacgggcagtgtttgcataggttgtgcaagcacgagttggaagttgcagcatataaagagaactgcaataaaaaatccacgtaataaatgtttcatgttctatttagtttataaaaaagttgtttgaaatatctgtcgtattcttttgtgtataatcacaaacgggcagaaaaaagagttatttgatagcttcccgtattctgactaatttcgttaatagtccttccagaaggtccagcttcaacatgtttgctccgtcgctcttggctacggcggggttttcgtgtgtttcgataaagataccgtcggctcctacggcgatgccggctttggctacggtttcgatcagttggggcataccaccggtcactccgctggtctggttgggttgctgcaatgaatgggtgacatccagtatgaccggataaccgaacgtttgcatttccggaatcccccggtagtctactacaaggtcctgataaccgaaggttgttccgcgttcggtcagcatcacgttcttgttgcctgcttccaccactttgtcagcggcaaactgcatggcgagcggagagaggaactgtcctttcttgatgttaatcgtcttacccgttttagcagcagcaaccagtaaatccgtctgacggcaaaggaaagccggaatctggagaatgtctacgtattcggcagccatctcagcctcgtcggccgaatggatatccgtcactgtgggcactccgaaagtatcatgtacctttttcagcactttgagtgccttctcgtcaccgatacctgtgaatgaatcaagacgcgaacggtttgccttgcggtaagaacctttgaatacataaggaatctgtaatttttcagtgactccgaccacacgctcagcgatgcgcattgccatctcttcaccttctattacacatggaccggccagcagaaagaagttaccggcaggattgttcttaagttcgatcattttattaattacaagttactaattacttatttatagtttcatgagtgaagggctgtttttcgccagaagcccggttctgttggctaattcggaataatcagggtcgtcttttctgataatacgcctatttccagtgggaaatgtcttgccagcaggcgaccgtccagatcgacggaagcattctgtgcgcggagcacttttacttttcttgtccgatagcttttcaccatcttatggttcaggattcttccctgaatcagcatccacaatcccgaaatgatttgcaggaattccggacggtagatgacggatacatccagccagccgttgtagggtacggcactcggagtctgtccccagccccaggcgcttcctacacatacggtcatgatgcgcccgcggatgtgctcgtcattgatacgaaggtgcatccggtatagtttgcgttcgaatatcagcgagaagagggcggcaacgtacgacaggaatttcaccccccagaaacgtttggtctggtcggtgattttcacaatccttgcgcctagcccgatgttgactgcattgaggaaataacggcgttggtgttccttgccgtcgtagaagttgcagaagcctacgtctattttcttgagacggtggttgatgatacagtctacggcaggtttgtattcggtactgagtccccagtatttggcaaagtcatttcctataccgttcgggatcatgccaagggcgatgttctccttgtcttcggcatcagagagcatgataccgttgatggcatcgttcagcgcaccgtcgccacctacgatgacaatggtacgatagccgttgttcgccagaattttggcaagacgttctacagaaccgaaaccttcggattgtacatagtcatagttgacacctttgctgtccatgtactccttgatttctttccatcgtttctgtacctttcgggtacctgctttggggttgtagatcactccccattttccaggttctacactcataaccgtatttctatcctaactgtattaacaatcgcattttttatctttcacagaccattcgtaaatgactggcaaagatactaattccctcgcagtttttctatcacaaaggctatcttttcttccataggcagctctgcactgacccagtggatggtaaatccccgacgttccatgccgcggaaccaagtcatctgacgtttggcgaactgatggatggccgtctccagctcagtgaacatctcttcgtaagtcagtttgcctatgacgtataacgtcaggaatttgtattccagtccgtaataaatcaagtcgtccggtgaaataccttgttctgtcaatcgccttacttcatccaccattccttcgtccagccgttgtttcaaccgtcgggtgatcttctcgcgacgcagttcccgatcgatatctaccccgatgatgaggctgttcaacttcggaaactcccgttcgggaaccggatgcacggcataatactcctcaatttctatcgcgcggattgcacgtttcacagtatccacatccgtagagttgtgcaatgttttatattgcttcaggatttcggtcagttcttcgagagagtgattagccagacgggcacgtaactccggattttccggtaccggcatcagcttatagcctttcagtaccgattccagatacatacctgtccctccacataaaacgggcagacagcctttttgtttgatggattcgtaagaaatcaggaaatcccgctgatattcgaaaacattgtatttatatccgggatcggcgatatcaatcaagtgataaggaattggatgtccgtcgactgtataatctgccaagtccttgcccgtaccgaggtccattccccgatagatctgacgagagtcggcactgataatttctgtattcagttcatgggctaatgctgcagcaaaaggagttttccctgaggctgttggccctaatatggtgattaaatcatagtccggcatagctttattctttaatgacggcaaaaatacaaaataattttgacccagtgggtcatttgtatgcttttatctgattatttaataggaagcagaactcaaatttgaactacataaaagtttgaagaagcgttaagaaaagctacttattaatggtctgtaggatacgacatacctttccattcttgtccacgccctcaataatgatatcttcgggagctgtgctgtccggtgtatagtattctatggtcgctttgccttcggcgtctaaccgtaattccggattccagtaaacggtactccggaagtccgaacgctgagcgttctttttctcgggagtatcataggtggggtgatagaattctacggactcactgtatcccagcggtgtataagtgataattccttgcgctggtctggccggaagatttctagggtctttcagagtgatgacaacggcacctccggaagcacggggacccagtatgacggcatctgctcctcgaagcagactgatactggacatgtcactgacttggatatccttcaaaatatcggaagcatcttcatacacaatatcatcgataacaatgattgccggttcggaattgttacggatatgtatctcacttccgttcgtgattgtaacgctgggtagtctgctggctgcatcaaaagctgtctgaccgtatccttgcagtctgtcttcttctacagtataggtgttgataccccccgtatagatactttttgagctcggacgttcccgcttcgctgtaactgttacttctttcagattgtacacacgcattcccccttccatgtaatactggtcacgggtattcatcagataatcttccataaaggtagttgctccgttaaaataaggggctttatgcgtagcgaccgggtactggggaggatccattagaatatctacaccggcaaatcctttcttggtgcgtgcctgaacaaggaatgtcgtgctgtctctgaatgaggtattgacgatgaactggcctttctcgtctgtctcggtggtggctatgatattgtatttgggagccagtacacagatgggacctttctttacgtttgctccgaagaatcccatgattcgtccgctgatggtttgtcctttttctatataatttgtgaaattcagcgaaggagtgcggagaacattttccattttatgcctgcgccagccatgtgtcatcatcagatagtcgatggaacggagcgtccgggcgtcctgattcagaaaatagaatgcggggtcttccacatatcctttcagatccgaagtcagcaggagattggacaggatattatcggcgagagagtcgggctgaatactttttcggtcggtgatgctgacagagaaagtaccttctaccgggttgccctcgctgtctttggcagcgatctgtaaagataccttctctctttttccatacgtcggttggtctgtagtgatttgccattgattcggcttatggtccggaacgaaaatcaaccgttcactaagtgcatttccttgttcatcaatcagcatgaagtgagtgatcccttccgtaaacaggctgtcattcatctttccgaaagttcttttcggattgatgggttgtaaaatggccagtttgccacgggtatgtgcaagcagaaatagtttctgaggccattcggtcgcttctgtcttttggatttcgtagcgaatctcctgtttatagtgcgacatggcgatggagattcctttcggttctatggcaggaaggtcaaatcgcttggtaatactgtcattagttcttaccgtaacataataagtctcattgttgacgggattcatcgtgaagatgcccatgccgttgtgttccgaacggaaattggtaagtgtgtctcctttagagttgaacaagaaaccttcgatctctttagagaagccatctgctccctgtgctttgaaagcgacattctgatgaggaatgttgatcaaggcaccgccttcggggaaaaacttcacatcgaaatcattggtaaacacaggaagatggaaagtccgtttgtagatatattgcggatcgtcaaattctacttctattctgcgcgctaccggagattttaaatcgggtagggaaatggaaatccagccgttttcgtccgtcttttttttgcctttgttttttatcttaccattctcaaggtataggtatttgattgttgtattttcaaaaacagcctgtacgttgcttgtaaatttgatcttggcagtgtaatgtgtatcatcttcttgctgatactcgatgctcgaaacgatggtattgtcaatagagtttcctatcttgatgttgcgcgaaaagaaaaagtcggggtcttcattcagcatccagttgctgtatccccgcaggtaataatcgcctgccggaagggtggcagggagggtgaaggcgttgtggaatccgagagaatctctgcggattttctttcgttccacaatggagtcggaacggttgatcagttccgtaatgataaaattactttgtgcgttgttctgatgggtgatggcgttcaccagatagcctttgaaccatatcttttctccggctccgtagaaaggcttgtccagatggaggtacaacttttctttaggaattctttccatcagactgaagttggcgataatcgtatcttgcatggtctgtgcagatagcgatgagaaatatagaaggactcccaagagtactgtgatacttcttttactttgaagagtagtggtgtttttcatatattgtgtttttaacttttatgcatccagattgaaagaacttttcgcttcacagccagtatattaatgactgatacgatgaggaataaaagaatacccatactgacagctacccataacgaaccggtttccagttgcgggaagaggagtctgatactctctatgtaatagctgcgcagccagcataccaatccgacagataaaatcagtacgatgatgttcagtcctacggtcagtatctgataaggcagcgctaccctgttggggctgtagcctatcagaagcagactttcgagtttggttgtattcttttggagcagtaagaatatgctgagcatcaggatatagaatgacaggatactgatgaataaacctactcccagcacaatacctacgataaggcgaaggaaataagtggtctttccggcatccagttttccgtcttccgtctcgtagccttttttctgaaagtagctggcaatagaagagtcggcgggattgctgacctcgatgatcagtcgggcaggttgtgcctccgcgtcgggggcgaagttcttgtttgcccagttcatgaaagactgcggaacgagaatcgtattcagacggttggaaaaaccgacgatgtttcccttgtattgttctacccgtccgttgccccgcatcatgatgtccatctgaataagtcccattaatccttctgacaacttaggcagactgcggctttgagcgaaaccgaagttatacagattcagataattgcgtgggataatgatgggaatggtatgtgtttcttcgtcaaagtgccatttgtcgagtttgatatctacaaattcatcgggaactgactcgaagaacatatccgtagagagatgaatacccgctttctgcatccccaatcccgccgaaactttgaattgagaaggagtgaaagctcctatcgttttggtaaacgactgttttttcagatcggcgatatcttcgggagagaacgtattgctttttccggcaaaagacccgagcgtactgattttcttggttgctatgatgaagtcttttttcataaagctgtctccttcggtgaatacgggaatgacatctttgtaaaactgtacgctgagcaatacaatcatcatgccgaacaagttggctaaaaagaaaccggctaactgaccgatactgatatgttggcggagaagtttccagacaagggtattcattattttgtatttttatatttttaggcgcgaatgacgcagattctattatagttgaagcaccttcttgtatggcagttcgatatgtttgccaatggacgtggcgatgactccggcaccttgttttccggcttcgtcaatgatgatttctcccatgatgcggctgttctcatcatccaaatggctgataggctcatccagaaacaggaagtcgaacggctggcagaatgcacggataaaagcgacccgttgttgttggccgaaagaaagttttccggctttcacgttcagtttatctgagatacccagcttctcgaataatgaaagaatctcttttttcttcttgtgtccggtaaggttattcttcagttgtacgttttctatcgctgtaagttcggtgaagatacgcaagtcttgaaaaagcatactcagtgaatgctttctcaggtctacccattgcttcacggaatatgctttgatattggtttcatcgaaattgataattccttgataatcgttgcgatagccgtaaagatagctgcacaacgatgattttccggtgcctgaggcggcttctatcagatacatttctcctttccggaagataaggtcctgatgccatacatcagaggtcaccgaattacggtcagcaaacacttggggaagtgtttgctgtaagtgaatactattcatgccgttcattgacgaattacatgccggcgaattgcttggcaaaatctacgatttgtttgagggcattgacatctttgtctttcaggcaaaggtctgtttcgcttgtttctccttccgaactaacggataaataagaaactttggaagcgagatcagaataagtcttgaactccttgcctccgaagcctaccagcatctttacgaccggtaaatccagtatggcttctgcattgatggccataaatacggtcttgcctttcatgtctgctgcgtaaggagcgtctttgatcgatttgtcaaccgttttgccaatgctcttgtagagcagttcgtcattggtagcatacatctgtttgtccttgatgccgaaaaatatattcatgcctcttgttttgtagacatactcgtctttgcccagttccatgatgtcttctccttttctcatgcccagtgactgcttgttcttgtaaagagcttcaagagcattcccattctttacatcagcataagcaagaaaagtaggggcactgttcatggttacattgatcagcccggcagagatatcgccgttgaatgaactgaacagttcttttacttcatccgctttggcgatagacacagtgctgcggaattctttattctcactcaacagattgtaaagtccgtctccttttacgcccatattgatgaacatcagcgtagatgccggaaagtatttcacgaatgtgccgtttgtctttccaaatgattccatttgttttttcagaagcgctttgacggcgtcgttctccgtgtagttttctgttttaagggcgatcttgcctttttcgaagttcagtccgcctaggatggtaatgtcttccggtttgatttcagaaggaagtcccatgctgatctggcttctgtaagtagaagggattgctgacatggaggcgaagaagttgatatcactcttttgcttggctattttctggaaggctccggatttcgcaatgctgttgtcggcagtctgtttcattagtttggtgatggcttctttggctgcttctgtctgagaagttctgctggcagagataatgattgcagtggtttcattgaaagcaagcaagtttccgttcagggtagtgaagctatatccgtccgcttcgctgaccggctggcagatttgttcttttgccatcacatcgagggaagcgtgcaaatcgtcttcattgctgactttggcaacgaatgcaccaccggaaatttggggagagctaaagatatagatcggtgcttccggatccagaccggatgctcccggattgttgatcaccttctccaactgttggaaagtggcagcattcatcccgcttttcattgcttccagcagtttctgtttagcagcttcattttctttgtcgttcattccggctttgttggccagtgatttcaaatcaatagaggcaacagccgtagcgtctgccggtattacgttcgtatattccgtttgtttggaacatgctgccagaaacacaatcagtactgccagtaccgagagccgtgagatcattttctttgccatactcatactatttaaaagttattattggttcaataagttcattgtgtggcaagccacgagtgccgctgtctctgtccgaagccgtgatttacccaagctgatgggagtgaatccgcattcgatggctttcttcacttcctcttcgctgaagtctccttcgggaccgatcagaacgagagcatcttctcctgctttcagtacatttttcagctgaggcttttcgccttcgtaacagtgagcaataaatttctgaccttgaaactcttgtgcaatgaacttgtcgaagtccgtcatttcgttgagtttcggcaggcgagccttaagagattgcttgatggctgatatcagaatcttttcgatccgttcggttttaatcaccttgcgttcggaaaaacggcagttgagaaaagtcagttcgtcaaatccgatttccgtagctttctcggcaagccattcattgcggtccatatttttggtcggcgccatggcaatgtgcagatgacacggccagagcggttcctgaaagattgtttctttgatggctacaaggcaacgcttattggttgcaactgtgatttctgctttatagaaatgtcccttaccgtccgtaagagtgatttcgtctccgatacccaaccgcaggacgcgggtacaatgttgtgcttcctcttccggaagttcgtagtttttctgtatatcgggagtataaaatacgtgcataattggttagtggttttgatttcttgaattgatccggtcgcgtatcttggcagccagttcgtaattctcgtctttgattgcttgatccaatgcttcttcgagtgacattgaagtaacgttgcgaggcagatcccgcttcttttcgtcttccgcttcttcatcagactcttcaggatgtcttctttcctcgttcgatatccgaaggcattcctgttccagaatggattcataaatgaggatcggacattcagcacggattgccataccgacagcatccgaggtacgtgtatcgatacgtataatttcttcgtcttttttaaggtaaatgtaggaatagaaaataccgtccttcgccttgtagatcaatacgcggagcaaactagctcctaatacgccgataatggtcatgaacaggtcgtgtgtcagagggcggggagttttgacccccttcatatacagggcggttgcctgagcttcagcgggacctatgatgataggcagttgccgttcaccgttcacttcacccaacagtagggcaaaagcgcctacttgcgcttggctatttgtgatatttaaaacttgtaattctacttttttgtccattgttcttttttacttaatttactttattctctcgttggtgtttgtacttgaataccagagcaaacaggatgccgatcaccagtgcatacgccgcaaagataaaccagatgtccggccattcacggctcactagtttgccatcagcatatactgagaatgcgtctacgacagcaccgctggcatatcctccgatgatggcacccaacccgttggtcatcataaagaacaacccctgggcactggcacggatggaggaactggtttcttgttcaacaaacaacgaacctgaaatgttgaagaagtcgaacgccataccatacacgatcatggaaagaatcagcatccacagaccggaacccggatctccgaagccaaacagcccgaaccggaatacccaggcgaacatactgatcagcatcacttgcttgatgccgaaatgtctcaggaagaatggtatagcgagaataaataatgtttcagacatttgagaaatagacagcaggatcaccgaatgttttactccgaaagaatctgcaaactccggaatactggcgaagctcccgaggaaaaggtcaccatacgtgttggtgatctgcaatgctgctcctaaaagcatggagaacaggaagaaaatagccattttctttcttttgaataatacgaatgcatccagtccgaaggaagaaagtaatgttttcttttctgtcttggccggtttgcatgccggcagggtgaaagagtataaacccagcaagagtgcggatgcaccgcctacataaagttgtgcgctggaattcttgaatccggtaaggtctactgcccacatggcgcagataaaaccaatcgttccccatacacggataggagggaagtccttgatcaggtcgcatttatattgttccagtgcattgtatgaaacggtattggccagtgacagggtaggcatatataccaataaattgagtagcatagcccaatacatctggtcataattcgtaacggtagaggcatagaaaagacaagctgcccctgcgatgtggcaaagtccgtataaacgttcggcattgaaccatttatcggcgataataccaatgatgccgggcatgactaaagaggcaatacccatggtggcgaagatggcaccgatctgtcctccttcgaagtggagttctctgcccatgtaaccccctagtgaaattaaccatgacccccatacaaagaattgcaggaagttcataatgatcaaacgaacttttatactcatgacttttctaatttgtgtttctctttttacgttaataatagatgcaaatataatattttcgttgattgggtggacaagttaatcgataaaaaggggataaaaaagccataaatgcgaagaatagtgaagaattgctgttaaaaagagggtggataggcatataaaaaaagaaggctatctatcccagacagccaatctttattaaccttaaatctaataccatgaaaaacacagtgcaaatataaaggattttatgttatagaacataatgatttgccgaaaaacttctatttgttaactctaattaactttgaaactattatttttcttttattcaccccttgtttatgcaagttcatggtgtttatgacatatattactctacatagagtaccagccctttcaggtattctccttcgggatggtatatatttaccgggtggtcggcaggctgggttagttggtgcaggatacgtacactacgtcctgacatagcagcagcggtaaacacagctgtgcggaaattatccttggttaccacctgcgagcaggagaaagtaaacaggatgccgcccggtttgatcttttcgaatgctttggcattcagtttccggtaaccttgcaaggcattccgcaaagcatccttatgcttggcaaatgcaggcgggtcgaggattatcaaatcgtattggtcgcccatgcggtcaaggtatttgaaagcatcttcggcgaaagcttcgtgacgcgcatcgccggggaaattcagttctacgtttttgttagtcagatcgattgctttggcagaactgtcaacggaatgtaccagctttgcacctccacgcatagcgtagaaggagaaaccgccggtgtagcagaacatattcagtaccgaacggtctttagaataatgctccagcagtgaacggttttcgcgttggtctacgaagaatcctgtcttttggcctttcagccagtctacatggaacttcaggccgtattcccgtgcgatattatcgctgcttcctcctttaaggaaaccgttttcggggaaaagatctgccttaaaaggcagtgtagtctccgatttataatagatattttcgatcttgtcacccattacttccgacagggcttcggcgatagtcatgcggtctacatgcattcctgcggagtgcgcctgcatgacggcagtccgggcataaatgtcaatgaccagcccaggtagattgtctccttcaccgtgtacaagacggtaggtgtcattggtgggattgactgcgataccgattccacaacgcatatcataggcaatttgcagtttacgtttccagaaatcgtggtcgatgggttcctgacggaaagagagcacacgtacggcgatacttccgatctggaaatgtccttcggctataaattccttcttcgaagtgtatacttctacaacttcaccttcttcgggttctccatcgaaacgagcgattgctccggagaaaatccagggatgaaatctttttaaagactcttctttgccgggtttgaggtatactttatgcatgttgtttaaaatgctattttatcagttattaattagtcttttatcggtcatttgtcagcgattggcgggagcatttgcgtcaacctcttcttctacagggaggctttcgacctcgtagttgccggttcgtttcagttcctgcaacaggttgtagatgttgaggcaagcccaggcatcggtagcggcatattgtttctgtccgtcgctcagtacgtccgcttcccagttggacagccgttgtgatttggaaatcttttctttgaacaggattgcataaatcttttgcagacttttgtcctgtatgccgaactggcgtacatagtcttgcagttcgatgcagctctgttgggtaaaaggtgcacgtttgtgcagcatcataaagtcgtctttgagcgacagtcctactttgataacagccggattttccagcaggtcgaccaaaggttgggtgagtccggtcatattgaggcggaacaggaaacagcattcgtctgaagaaatctgcagaagtgctactttatgactttgtcctttggtgaaagatgggcgcgtttcgctatcgatacccagtatcggctgagattgcaggtaagctactgctttttctgtttccgcttccgactggatcacatggattcgtcccggaaatacagttttcgggagttcctttagttcgtctttatttatacttcttcttactatcatttttgtttattcgtcattacgacaatggcaaccgtcctcatgacaatgacattcgtcgtcgtggcagtgacaaccgtcttcttcacaacaatagtcgtcatcgcttagttcgttattctcttcctcgttgtcttcttcgtcattctcattctgctggttatacttcacatcgtgaagggcacgcagagtgtttaccaacttctgtccccacagcagaccgaagttttcctgacagatggccagtgagtcgttcatggtttcgttcagtcccagctggaaaacgaaaataaaatctttgatatcctgatagatatctgccaaatcttccgagatggacttcttgataggctggtcactgtacaccatatcctgtacgaaaacgtccagataatcatccttttcacccatcagccctgccagattgatgcgcagaatctcgtagatttcctctgttacatacgtttcgggtgcctcgtctccaatcgtttcacacttcggaagcaaggatgctttgagatagagcaggggaagtatttttaaggacgtgtcgacaaaagctttgcgcttcatgtgttcagcacgttcgaggaatgcgcaaaattcggcggctaccgttacgaactcgatcacattcttttcaaatatcgtttggctttctttttccataatcagattgatttgaatcgcaaaggtaagaaaaaggattgaatgagagtactgctcgttatttttttattatttttgcggcttataatacggattccaatttatttaaagaataaagactcatggcaaaaaagaaaatagataaggaggctgaacgcactccgtcttctcctggaaggattgtatcaatttttaagaatgaaaccgttcattttgtgatcggattgatgctggtaatcttttctgtttatcttttgttggctttttcttccttcttctttacgggggcagccgaccaaagtattatcgacagcggcaactcggcagaccttgcggcggttaataacaatgtaaaaaactatgccggatctcgcggagcacagttggctagttatctgataaatgactgttttggaatatcttctttctttatccttgtctttttggcggtggcaggattgaagctgatgcgggtgcgcattgtccgtctgtggaaatggtttatcggttgtacattattattgatttggttctccgtattcttcggtttcgctttgatggatcattatcaggattctttcatttatctgggaggtatgcacggttacaatgtaagccgctggctggtttcgcaggtgggagttcccggagtatggatgatcctgctgataacggcagtctgtttctttatctacataagtgcacggacgataatctggttgcgcaaactttttgctctgagtttcctcaaacgtcagaagaaagaagaggaaaaagagacagcagaagaaggaacacaggagttcacgacctcgcaaccgcaggaagtggagttcaatctgaaacgtacttataagcaaacacctcctcctgctcccgtgatggatatacaggcagaagaaccgaaagaagaatctccggtcaacgcaccggaaccggacgacgaacttccttctgctgatgaggcggaaggggtgactatggtctttgaaccgaccgtaagcgatgtggttcctcctgctgctcaggatgaattgccgggtgaggatgaacccgggttccaggtagagacagctacgtccgaagaagaatatcagggtccggagcaagaaccttataatccgatgaaggatctggaaaattaccgtttcccgacaatcgacttgatgaagcattttgagaatgacgatccgacgattgacatggacgagcagaatgcgaataaagaccgtatcattaatacattgcgcagctttggcattgaaatcagtacgatcaaagctacggtaggtcctacggtgactctttatgaaattacccctgaacagggtgtgcgtatctcgaagatccggggcctggaggatgatatcgccctgagtttgtcagcggatggtatccgtattattgctccgataccgggtaagggaaccatcggtattgaagttccgaataagaatccgaagattgtatccggtcagagcgtgattggaagcaagaagttccaggagtctaagtttgacttaccgattgtactgggtaagacgatcacgaacgaagtgttcatgttcgacctttgcaagatgccgcacgtgttggtggcaggtgctaccgggcagggtaagtctgtcggcttgaatgcaatcattacttccttattatataagaagcatccggctgaattgaaatttgtactggttgacccgaagaaggtggagttcagcatttactccgtcattgaaaaccattttctagccaaacttcccgacggaggcgaaccgattattacggacgtgaccaaggtagtgcaaacgctgaattctgtttgtgtggaaatggatacacgctatgacctcttgaagatggctcatgtacgtaatgtcaaggagtataatgagaagtttatcaaccgccgcctcaatccggagaaaggacataagtttatgccgtatattgtggtggtaatcgacgagttcggagatttgatcatgactgccggtaaggaagtggaacttcctattgcccgtattgcgcagttggcacgtgcggtcggtattcacatgattatcgctacgcagcgtccgacaacgaatatcattacaggtacgatcaaggcgaacttcccggcacgtattgcgttccgtgtatctgctatgatggactcccgtacgattcttgaccgtccgggggcaaaccgcctgattggtaagggagatatgctcttcctgcaaggtgctgatccggtacgtgtgcagtgtgcctttatcgatacgccggaagtggaggaaatcacgaagtttattgcccgtcagcagagttatccaactccgttcttcctgcccgagtatgtgagcgaagacagcggtagtgaagtgggcgacattgatatgggacgtctcgacccgttatttgaagatgcggcacgcttggtggtcatccatcagcaaggttccacttcgttaattcaacgtaaatttgctattggttacaatcgtgccggacgtatcatggatcagcttgaaaaggcgggaatcgttggacccacacagggaagcaaggctcgtgatgtactctgcatcgacgataatgatcttgaaatgcgtttgaacaatttacaataacagatcgtttattaatcaaatgagaaaatacatttttagtgttttaatagctttactgtcactgcctgtgattgctcaacaacagcagtcgcaggctaaagttgttctggagaagacagccgaagcatttaagaaggcaggtggtgtaagggctgattttaccttgaaggctgtcaatgacggtcatttggaaggacgtgagaatggtatcatccagttgaaaggcgagaagtttatgctgaagacctccgagacaaccacttggtttgacgggaaaacacagtggagttacatggtgagaaatgatgaagtgaatgtcagcaatcctactcaggaagagttgcagcaaatcaatccgtatacctttctttatatgtatcagaaaggattctcttataagctgggaactgtgaagatatatcagggtaaagctgtttgggaagtgattctgactgctaatgataaaaagcaagagttggaaagtattacgctttatgtgacaaagagtacgtatgaaccggtttacattcagcttcagcaacgtggtcagaaaacgcgtaatgagattaccgtgacagcttatcagaccggactggattatgcggatcatgttttcactttcgaccggaaggcataccccactgcggaagtgatagacttacgataggatgttcttttgagtaagagatgagatagttggaatataaaacaataatataacaataaaatggcagaaatagaaaaagtaaaatgcctgattataggctcagggcctgccggatatacggcagcgatctatgcaggacgtgctaacctttgtccggtgctttatgaaggattgcaacccggtggtcagttgacgactactacggatgtggagaacttccccggttatccggaaggaatcagtggtccgcagttgatggaagatttgcgtgcgcaagccagccgtttcggaacagacgtccgtttcggtattgctacagcggcagatttgagcaaagctccttataaaataacgattgacggtgataaggtgattgaaacggaagcattgatcatttctaccggtgctacggccaaatacctgggactggaagacgaaaagaaatacgccggaatgggagttagcgcttgtgctacttgtgacggtttcttctaccggaagaaagtcgttgcagtggtgggcggtggagatacagcctgtgaggaagcgatctatctggctggtctggcatccaaagtatatctggtggttcgcaaaccttacctgcgtgcatcgaagattatgcaggagcgtgtgcagaagcatgagaagattgaagtacttttcgaacacaatgtagttggcttgtttggcgacaacggcgtagaaggtatgaatgtcgtgaagcgttggggcgaatcggacgaagaacgttacagcctgccgatcgacggtttcttcctggctatcggtcacaaaccgaattcggatatcttcaaggagtatatcgatactgacgaagtgggttacattattacagatggtgacagcccccgtacgaaagttcccggagtattcgcagcgggagatgtggctgatccgcattatcgtcaggctattacagcagcgggaagtggctgtaaggctgctatcgaagcggaacgttatctctctgcaaagggaattatttaaagatgaagtaaggcggaatgctttgcatggaataaataagaactgaatcgataaaaaaacagtggacatgagcaacaagctgaatgtccaccgttttttgttatctcacaggcattaatatgcttcgatttcgtctatccacaattcggcaggaatgacttccggaccgttgttcttttcgaaattgacgccattacgcaaggtaccgccattcttgatttttactttcaggaaagtggcttgtgtcggttcgaattcgatagagtcggtgaatgcgattcttcccgtttccggacaatcatgcttcaatactttttcggctatctgagtatattgctg

SEQ ID NO: 4594 - DNA, 1225 bp, Unknown
  gut microbiota DNA sequence
gggcagggtttgccatacatgctgcaaacactacatcccgtacaaggatgaattgctttctctttcagaaaaatcttttctacttcattgcctgtttcgagggcacctttcacaaattcgtcacaaagcatatcagaattaccgccctttcgcggactggacgaaataatcagaacttttttagccataactttattacttttattttttgaatttcatgaatcagctttttcactctgcaaaaatagacaatttatcatatagcaaatgtagataaattacagagatgtgtaccctaattactgattcaaacattttctgccatttttactttttatcaatatccttttcatctcatccataatcggtctttcggcaacacaaacataaaaaaagattttctctgcccatatataattcatatctttgcctatgatacgaacaacataatgcaatgaaaaaaatacaactgaccaacgcacataaagaaaaattatttcaaatccctttatttcgggatttacctctgaacatcaaggaatctctgttggacaaactggatttcgttatctatgcagcggataaaaaagaaatagttgttacgcaaggtacaccttgcaacaaactatatgtgttattggaaggaaaactacgcacggatatcattgacggattggggaacgaagtgatgattgagtatatcatcgcaccacgtacctttgccacccctcaccttttcaattcaaacaatacgttgccagctacttttactgctttggaagacagcgtggtactcatggcaaccaaagattccacttttaaagtcatcagtcaggacccgcaggtattgcacaattttctttgcatcgccggaaattgcaatatatgtaccgtatcacgtttgaaacctctgtcgcgcaagactgtacgcgaaaggtttattgtttacttattcgaacataagaaaaaagattctctgacagtagagatcatgcatacccagtcccagcttgccgagtacctgaatgtatcacggcctgctttatccaaagaaatcaataagataatcaaggaaggactgatcacaatggaaggaaaaaagatcgagattctgaataaaatggcgctggagaaatacttataataaaaagagaaggtgaattctaagtcctctccaaacaatatctataaaatcttacccaagtttacgaacattaacgtatcc

SEQ ID NO: 4595 - DNA, 68320 bp, Unknown
  gut microbiota DNA sequence
ccttccatcgagtggatgagggcggtttcctcgccgcagacgaacgcgcctgctccgtaacggatctctatgtcgaagctgaaatctgtccccaggatgtggtctcccagtaatccgtatgcacgggcttgctcaatcgcttttttgaggcggttgatggccagcggatattcggcgcggatgtagaccagtcctttggaggaaccgatggagtaaccgcagatgcacatcgcttctacaatagagtgcgggtcgccttccatgatggagcggtccatgaaggcgccggggtcgccttcatcggcgttgcagacaacgtactttacgtccgatacctgcttactggcaaattcccatttcaagccggtggggaaaccgcccccaccgcgtccccgcaggccggagcgtttgatgacgtcgatgacgtcggcaggctgtttgttgagaaggcagtcggccagtgcgaagtatccttcacgggcgatgtattcttctatattttcggagtcgatgaatccgcagttgcgcaaggcgatgcggagttgtttccggtagaagtccatgtgtttggagtcactgacagtttgttcggtcttcgggtctatgtagagtagccgttcgattcttcgtcctccgatgatgtgttcgctgatgatttcctccgcatcttcgggagtgacttgggtatagaacgtattgtcaggaatgatctttacgatggggcccttttcgcagaagccgaagcagcctactgtgatgacgtctactttgtcggttatcccgtttctttcaatggctttttgaagattttcagtgatgccctgactggaagaggctttacaaccggtacctccgcaaataagaatctggaggtgtgctgttccggacgccagtccgcaacatttttcggaaaccttttcattactttcttcgcgcaatgaaagatggtgctccgctctcttcctgattatttgcaaatcatggatagatagtattttcataagtatcagaattgttagatttctgcaaatataattctttgttcggaattaacgctttgtttagagaaaataaatattcttctttggtgccggcttgcagaagtatggtatgaaatctttatttttaacacttttaatagacggtgttaactataatagtagcataaaaaaattatcttcgcatcgaaaaagggcggatacccatatgaatccaacgatagttggggagattcgcaagaacattgtggagtgacttatggggacctgccggtactgtatctgaatggggaaatgctccttgtatgaagtatatatagcttgatggcaaggatgtacagcaagagttccggcggggacggggaaacgtaagttgcctccctgatacaaagggaaaaaaggggattgtgatagcctgtaagtggtatgcttgcaggctatcttttttgagtatacttgaatgtccggagtatgaaggcagtccgtaccggtgaaaataaaaacgggttttctgataccagttaggtaaataattccttattttcgtattaaatacgtagcaaacgtaaataagaaatggaagtatgagacgaattttgttaggattgtgtgtgctttttttcctgaatgcgcacgggcaggagattccgttgccggagaagatgccgcaggatcatccgagagtgctgactaccccggaaggaaaaaaagaaacatggaagttgatcaagaaggaagcatgggcacaagatgtctttaacaagttgaaagaacggacggaagtatatacgcgacgtacggaaagtcagccggactggttattatcccgtttggccatgtactggaagtcgcatgcaacggaagtgtacgtgaaaggtgaggtgttcgaccatgccggaggcgcgaaggcacctgccccgacagttcgctataccggaacacgagggacggccgctacgcatggtcgacctaaactggaagatgtagtaccttatgacgatagtgcggaaggaaacgtgactttctgcaacaatgccttggaaggccgtccgcaggaaagtgtgcatccgtccaagaccgggcgcaatattgagagtctgaactgtgagattctgggaattgcccgtgacgccgctttcctctattggatgacgggagaagaaaagtatgcccggctggctgccggtgttttcgatacttatatgacgggaatctattacagaaatgttcctgttgacctgaatcacgggcatcagcagacactggtggggctgacttcttttgaagtgatccatgaggatgctttgcatatcgttgtccctttgtatgactttctctatcattatctgcaatccaactatccggataagatgatgatttatgccggcgcattgaagaaatgggcggataatattatcaccaacggagtccctcataacaactgggatttattgcaggcacgatatatcatgaacgtgggactggtgctggaagataatgaagagtatgcggacgggaaaggacgcgaatactatattgactacgtaatgaaccgttcgagcatccgccagtggagtctgaccaagctggccgattacggctttgactccgaaacgggaatatgggcggaatgtccgggatacagcagtgtagtcatcaatgattacgcgaacttcacccatcagtttgaccataatctgcagtatgacttggtaaaggcaatgcctgtgctggcaaaagccgtagcggccactccgcagtatctttttccgaaccggatgatctgtggtttcggagatacgcatccaagttacttaagtacgaacttctttatccggatgatacagaatgcgcaggcaaacggaaagaaagagcaggaacgttacttcaccgctttgctgaaatgtctgaatccggaggaaggcagcgaaaaaagtggcaagaagaatgtacgggcttctgtcaattctttctttgaggacaagccgttggtgctggacccgaaggtggaggcggggaaaatcgaggattatgtatctcctctgttctatgcccccaacgtatcgtggctggtacagcgcaacgggatgcatccgtgcaacagtctgatgatttctctcaacgcaagtgaaggcaatcatatgcacgcgaatggcatttcgatggagctttacggaaaaggatatgtgctgggaccggatgcgggtatcggactttttctgtatagcggtctggactatgcggaatattactctcaattccccagccataatacggtttgtgtagatggcatttccagttatccggtgatgaaaagtaatcattctttcgatttgctttcctgttttccggcttcggcggaaccgggtaaaggatttacttccgtcacctatagtcaggtagctttccgtgagccggagagcagggcggatcagactcgactgatgggcattgttactaccggcccggagacagggtattatgtagatgtattccgcagccggaaagagcggggaggcgataaaatgcacgattatttctaccataatctaggtcagacaatgacactaacggctgccgacggcacggacttgaatttgcagcctaccgaagaacttgcttttgcaggtgcccatctttatgcttattcctacttatatgataagaaagtggctaccaccggtcaggatgtgaaagtgacttttaccatcgatatgaaggataaaggcggagatgatatttccatgaatctctggatgaaaggagaaccggaacgggaagtgttcaccgcactgtcaccgatgaccgaaggattgagccggactccccatatgccttataatataaaggagcagcctacgctcaccttcgttgcccggcagcatggagaagcatggaaccgtccttttgttgctgtttatgaaccaagtacgcagaaagagccttcggctattcagtcagtctcttactttgatgcggaagagcccggcttgaaagattttgccggtatctgtgtggaaagtaaaaacgggcgtactgaccatattttctctttgacggattcgtcgcagaccgcaacctatcagggaatgaaagtgaaagcggactatgccgtaatcagtaacgaatatgcgggaaaccggacgctgtttatagggaacggaacgcaactgattgcatccggtatcagtatccagacttcggaggctgctaatgtgctgctcgaaaagaagcagggaaaatggtatattctttcttctgccccctgtaagatagtgattgacggaaaagcggtgcaatccggaataaccaccgacttgacgttattggctgtacaataagaatcattgttagatgaataaacatatcattgttttaattgaacgattttgttttgcgagttttcataaatatctttgatagagaataggtgaatcgtctttattgttcgtaatactataaaagaattttattcggtaatatcatgaagaaatattggttcttattattagctgcattattaggtggtgcaacttgtatctttgctaaagacacgcttgcaacctggaaggctcccgcaggagttgctttaaatagtgattttacggttaaggtccgtttgcaagatggagtctggcataccttatcttcttatctgattaaggtggatgaggtaagagatacacgacattatgtagaaaatgcttcgatggtaatttttgattttacaggaaaagtggaagtagccgtaacctataatttgggagaagtacagacggcaaaagtccgtcctctctcgtatgatatcccatttcagatcgatggtaatacagtaacttttacattagagcatcctcgaaatttgtcagtagaagtaaatggggatatttttcataatcttcacttatttacaggatctccggaaagaacgattccggacaaagataatccggaagtaatttactttggtcctggaatacatacagtaaaaaatggggaattgagagtgccatccggtaagactgtgtatctggcaggaggagctgttttaatggggcgtgtcctaatcgaaaacgtacatgatgtaaaattgctaggaagaggaattatcgatcattctataaaaggaggtattcgtattgcgaattcccgagatgtctatgtagaaggaattgttgctactcaatgtgcgacaggagggtcggaaaatgttactatccgtaatgtcaaaagtattagttattatgggtggggagatggcatgaatgtttttgcgagcaataacgtattatttgatggtgtcttctgccgtaactcagatgattgtacaactgtttatggcactcgtttgggatttgaaggaggttgtcggaatataacaatgcagaattccactctttgggcagatgtagcccatcctatttttattggaattcatggtaattcaaaagctcccgaagttttggaagatctgaattatattaatattgatatattggatcatagagagaaacaagtcgattatcaaggatgtatggctattaatgcaggtgataacaatttaatacgcaatgttcattttgaggacatccgtgttgagaatttccgtcaggggcaacttgtcaatttacgtatcttttataatgaaaaatactgtactgctcccggaagaggaattgagaacgtattgtttaagaatatatcctataccggagagaatgcggaactttctattattgaaggatatgatgaaaaacgtaaggtaaagaacatacgttttgaaaatttgaaaataaatggaaaattgattgatgataatatgccggacaaacctcggtggtataagacttcagatatggcacgcatatatgtaggacctcatgtggaaaatattgtttttacaagtgatgtagctcagtcacaacgtcgttttgttcatccgggtattacttatacgcaaggtgacctcgatcgtatgaaagcaatggtagaggccagacaagaaccttattattctacctttttgaaattgaaggagtcttcttattcatcacttgatgcacctgtggtgaatcgtggagagcaaataaaggaagggcgatttaatgctacaatcggggtggatgggcgtcgtgctcatgatttagctcttctttggcacttgacaggagaagaagcctatgcacgtaaggctgtagaatatttgaatgcaaattcttattatactaatactagtagtcgtggtacaggaccgttggataatgggaaaatttatttgttgattgatgcggctgaaatgatgagagattattctggatggacacggcaagatcagcaacgtttcaaagatatgctggtttatccggggtatagtaatacggaaaattattctgctaaatatgctaattatctggatgatacaaaaaatggagtaactttttattggaatatctataattttgatgcagcgcgtttcggtaatcaaggattgtttgcagcacgcagtatgatggcaatggctatctatcttgataatgagataatgtatgaccgtgcttatcgctatttactgggaatgaaacatcgtaaagatgatttgccatatccttcaggaccggctatttccagcgatcaacccattcatgtttctcctactataattgattataaattgttacaacggaagaatgatattcaggattatggttatgacgaacagcttcaatattatatttatcctaatggtcagtgtcaggaatccagtcgtgatcagggacatgtattagccgggttgcacaattatgttgctattgcagaaatggcatggaatcagggggattctttatatagtagtttggacaatcgtttattgctcgggctagaatggagttatcgttataacctgtcaagtattcaatcttacaaaaaacaggaaacaccttgggagccaacaggattaacaaaggatatgaatgaagtcacatttgataacgggaaatatctccagataaaaagtcgtagcggacgttgggagtctgtgaatatctcctctcatggacggggagatgttgccgggacaggaggaaccagagaaatggcattggcacattatgcggtgcgtagtggattaccggctgaaaaatatacctggttacagcgttatcgtgattatatgatagaacgttatggatgtgagaattggggagtagccccgaattggttttatgagtggactggttgggggactttaactaagcgactgaccccttggatggcaggtgatccggttactttttctacaggtaagcgagtttccggtttgcatcaattgcccagtacaattttggctgctgattatgattattattgtatatcagaaaatcctgaagggcatacctatcataatatagggacagtacgtggaaatgagtatcgtccggatggagcagttgaattacagaaaatagataataaatatgtagtggttcaggtagaagacggcgagtggatgaattatactgtcaatatccctaaaagtggagcttatgctgtttttcttacttattcggcaaattcctcttcacatgtagcaatggcctctgatcagggattagaaatctcgtcttcgatcccttcttctaaaaagtggaaagaaacaaaacttggcgaactttcactttcggctggtgcctgtgtattgcgtttacgtgttgacaaggccggacaaaagttatgtctcagtgctttccgattggaaaaagtagaaagggatagataaagtggtgatatgatataagtatgtgtgaagcatttttagggagtaattaacgtattactcaagtaatttgtaggaaaatatagaaaaagaacagaaaaatgatcattatgatattataaattactatttttgtgcactctgttacaggatgatattctgatcctgataattgaaccgttgagcatgttttatattataaatgatagatatatgaaattattaatttttatttcgttatttggaggcttattgttagcctcttgtggtagcagtagttcacaaaaaaatgcaagtacacaagaagtaaatccggcagacactatttatttaggtgatttacgtgaaaaatttgaaggagatagtattttctttaaggtggttgctcctgacttgatgctgatggattaccagtacttctgggcggctacagagtctgaagctgtggagaaaggactgactaaagaatattataagcgtgttaagaaagaaatttcagaaaccaatgaagcaattaaaaaaggtgtaatgaaaggtgcggatgtaaaacgtataccggatttccaagaaggacaaaagaaataaatcgtttcaaagagaaattgattattgctatgatagataaaaagaagggagatgttaaatatgacttctcccttcttttttgcatcaatgtctggtgaaagagaatcataatttcatctgacgttttatttcatcatccactaccgtcatcataccctctacttgcgccagtgccagcatacgtccataaaaagaatagcctggattataccccttgtcttcatctcccagcatcattctcccgtgatcaatgcgcataggtaatcccggattttctttctcaaagattcggataaggtcaatgatatgtcctcttcctgccaggtgagaactttcaatgaagtttccacccggcatggcggctgtgctgcgtaggtgtataaagtgcgtacgcttagcaaacatctttgccaattcgcgggtatcattgtgttcgccggcactcaaggaacctgcacagaatgtcagtccgttgtgcggattgtctactgcattcagaaaccaggcgatatcttcttcattggtgacgatacgaggaagaccaagaacctggaatggaggatcgtcgggatgcacgcacatattcactccgtattcttcgcaaaccggcataatggcagaaagaaagtgacacatattttctcgcaggatgtcacggttaatatctttgtacaaagttaacaaccgtttgaaaaggacgaccggttctttgtctccttctttgatgtttccattgacaaatccttgtgtcttaacgataatggtatcaatcagatcatccttctctttttcggtgatcacttgatccagttcggaaactttatgaagttcttcttccgtataatccttttcagccccttcccgttccagtatcttcatgtcgaaataggcgaaacggatacggtcataatacaatgagctagtaccgtcggggcagaggtactgcaagtctgtacgtatccagtcgatgactggcataaagttatagcaaacagtttttattccacatttacctagattggtaaggcttactttgtagttctctatcaactgttcacgttctgtcccaccatatttgatcgcttcgcatacgggcaaactttctactacagaccagcgcagtccgtatgattctatataggatttcagatcattaatcgcttctattgtccatatttctccgttcggtatgtcgtgcaaagctgtaacaatcccttccacacctatttgccggagcattggcaaggtaatcttgtctttcttgccaaaccatctccatgttttttccatcatagtttcttctctttatacgccgctgaatgcactgaatccaccgtcgataggcaacattgcaccggttacaaaactggcagcttcgctacacaaaaattgtacggcaccgttcaattctttaatatcaccaaaacggttcatcggtgtcttggctaaaacctttttgcttctgttagtcagcgagccatccggattgataagtacgcgacggttctgatcgccgataaagaaaccgggagcaatggcatttacacggatgccgtcaccatatttcagagccatctcactggcaagccattgtgtaaagttagctacagctgtttttgcagccgaataccccggcacacgggtgatggcactataagcagccatagaagacacattgataatgcaaccttttttctgctctgccatcactttaccaaagatcatagacggatagactgtaccgttcatattcagactggtcactttctcccaacaggaaatgtccatatcatagaagttctgatccgattcaagagtggctcccggcatgttgcctccggcaatattcaacagaatatcaatctgtccccattgggcaacaatctcttccgctactttttccagactggcgatgtccagcacgtctccaataataccgataatatcctgaccatattgtttaagttctgctacacggttgtccagttgttcctgacggatgtcgatagctacaacttttgctccctgctgtacaaagtgctgggcgatatttcctcccaacacaccacctgctccggtaattacagctaccttaccggcaatactaaataattcgttcatggttttatttattatttatatgaattgatgcaaaagtagctgctttttgaatgtgatgttgtgcttatttttgcaagatgtttgtttatatttgcagaaatgtatgaaagaaaagagacttttataaaaagaattgagaagtagtgtttctttgggagacagattgagtataataattaattcgttcgtatatattggaaaaacggataaacatgaatttaaatagaatgaagaaaagtatcttgcttttactgttggtaataccgacactgacaaaggcacagaatgtgatgacagaaacccgccgggaactgacttccccagacggagcgtatcggttcaccttttaccagcgttcgttcggagaggataatgcacgaatgtattatacgctgacatataagaatcgtccggtagtggaggagggtgaacttggtgtacaggtagagaatcaattgtttgaatcggcattgggagtaccaaatgatacttgctatttttggtgcgagaatctgaaattaacggatactgatcatcggaaaaacgatgcaacatggaaacctgtatatggagaacgtgccgaagttcgggactgttataatgaaatgactttaaagtttcgtaaaggtgagggacaagggatgactgaaggcggttacgacaaacgtaaaaactactttatgaatattatcgtccgtgcctataacgaaggagtggcattccgttatcattttccggaaacgaccaatgggctatttttacatattacaggtgaacggacaagtttcacaatgcctgaaggtacaatggcttactatgaacgttgggcacaaggtccttatgagcttcgtcccctgtcagggtggggaaaagaggaaagtgaacgccctttgactatgaaactgccagatggattgactgttgcattactggaagcggagatggtggattatgctcgtggaaaattccgtttgtctgcagagaagccttcaacactggaaactagcttgtatagcagcgttgacattatttctccctacagtaccccttggcgtgtcattatggctgccgaacgtccggtcgatttgatcaatcataatgatttggctttgaatttaaatactccttgtcggatatcagatacttcttggattaagcctgggaaagtattccgttctggagacttaaaacaggagaaagtaaaagcagccattgattttgcagcggaacgtggcattcaatatgtacatatggatgcaggatggtatggcccggaaatgaaaatgagttcggatgctactacggtttctccggataaagatcttgatatttctgctttatgtaaatatgcagaatctaaaggcattggattaatggtctatgtcaatcaacgtgctttggttcaacagctagattctttattgccattgtataaaaaatggggattgaaaggaattaaattcggttttgtacagataggtaatcagcattggagtacgtggctacatgatgcagtccgtaaatgtgcggaatatgaaatgatggtggatattcatgatgaatatcgtccaaccggtttcagtcgtacctatcccaatttgatgacgcaagaaggtatccgtggaaatgaagagatgccggatgcgacacacaataccattctcccttatactcgttttttggcaggcgcaggagattatacactctgttattttaatagtcgcgtgaaaaacaccaaagcacatcaattggcaatggcagccgtatattacagtcctttgcaatttatgttttggtatgataatcctgctatgtataaaggtgaggaggaactggagttctggaaagccatcccgactgtttgggatgaaagtcgtgcattagatggagaaataggtgaatatattgtgcaggctcgtcgttccggaaaagaatggtttgtgggagcaatgacaaatacagaagcgcgtaccattacgttaaccacggattttttgaaaccgggaacgaagtatatagtcaacttgtatgaagatgacgacaagttgaatacacgtacaaaggttcgtactactcataagaagataaaagccggagataagctaactttgaagttaaagtcctccggtggtgctgcactgcattttactcttgctgagtagagttgtgtctgcgataggcctctatcgcagacttaaccgaaccgtgtagcaacagaagtgcctcagccttttcgtagtccagatggagttcttcaatgatcatgcgcgttccccgatcaatgagtttttggttactcaattgcatattgaccattttatttccttgcacgcgtcccagttcaatcatgatagtagtgctgatcatattcagaatcatcttttgagcagtacccgatttcatccgagaacttcctgtcacatactccggaccgacaataacttctatcggtacatcagcttcggtagccatcggcgaatttggattactggtaatgcagccggtcagtattccgtgttcccgtgctgtatgcatggctccgatcacataaggagtggtgccggatgctgcaattccgatgactgtatcttcactattgatatgatgctgcaataactcttcccatccgcgggacatatcatcttccgcattctcgacgggattgcgcaaggcggtatctcctccggcgattagtccgataactacggtgggaggcataccgaaagtcggaggtatttcggaagcgtcgagtacacctaaacgtccgcttgttccggctcccatatagaatattctcccacctttttttactcggggaataattaatgtgaccagtttctctatttgtgggattgctttctgcacggcatctgctactttatggtcttcagtattgatatcttccagaatctcttttaccgacttcttgtcgaggtcatcatagagcgatggttgctctgttatcttgataaattccatgattgatcatttaaagcactaattctttgaacaaacgctccaaggtagcatccaaatcctcggaaaatccgggatgcgggcgggatacttgtatacatgagctttttacagcggtcagccaccggaaacgatcggggacatccatgcttgctatcattcccccttccttactacccgaacaaatcctgtcgaagacatgcagtccttctttcagacaattcatatccagttcggaagaaaacagtttcagtttattctcatctatcgtataaagtgatttgaggtatttgcatcgtttggagaacagtacaatacctacattgataaattcttcacgttctactttgggaacgaaacgaatggttgcgtattcatataagtgcctttcttgcatgttgcgcttcatttacaaatagttcggaatgcttgatcctttcctctaaaaattgaatataaatatctctcaggtcttgtggagtttcctgtccttccgtccagttcaaccagtcgtcggggacggtattgactatttcccgtatcttatcggaggttagtaactgtctgaatgccatatctgtttctttcagttggtcggcaaatggcaataaaacatgatcttttatctgcacgaatggggtgagtgcctgtttctgccagttggtccagctatgttggaagtaaagggaagctccatgatcgatcagccataattctttatgccacatcagcatattggtattcttgatggtacggtccacatttgtcagaaaagcatccatccacacaatctgtgaggcggttttaccatccacttgatgtacgacaggatcgaaggtcaacgctccggacaagaaatgcaaaccgatattcaatccacggctccattgcagtaaatcctgtatctcttcatctgcttccgttcggccgaaagcttcatctaaattcaggaagatgatctccggtactctgaagcccagagtacggcctatttctcctccgatcaattcagcgataagggctttggttccgtgccctgctcctctgaattttacgacatatttgaactcatcgtcagcttcagccaaagccggcaatgatccgccttcccgcaggggaagaatatatctagttacgtttgctgtacgtaaatccatatcactcctttcttaattgagaataaagatacgacgtttttgtgaaattgtcgatgaaagagttcctataataatagtttttttatatttttcggttgagtatactttggtttcgttacgtattacataaaataacgataaatgaatggaacatgaaactacttcgatttttagtatttggaatattagtgtttatgttatggccggaatgtatagcggcggaatggcagtggtctgtacagatacccggcattatttctaacgaaactgatgatcatccacaggcattcctatggataccttccgattgtgcccaggtaagaggtgtgatgataggtactcacaatatgacagaggaaaccctgtttgagaatcttctgtttcgggagaaaatgtccgaaataggtatgggcttgatctggattactccgggctgggaccagaaatgggatgtatctgccggaagtcagagggcatttgagcagatgttggaggactttgccgctatcagcggttacaatgaattaaaatacgttccgattgttcctttcggacattcggcgatggcaacttatccttggaattttgcagcatggaatcccgaacggacattggctgtcatatcctttcatggagacgcaccgcgtactaatcttaccggatatggacgtgataacatggagtgggggaaacgtactattgacggcattcccggcttgatgatcgaaggagaatatgaatggtgggaagatcgcgtaaatccggcattggcgtttcgcctgatgtatccccggagttgcatctcgtttctttgtgatactgggcgcggacattttgatattgcagaccgtacggcagtataccttgcattgtttctgaagaaagccatggagtaccgattgccggaaacgtatgatgtagataagcccgtgatgctgaagaaattgaatccggaaaacggatggcttgccgagcgttggcatcctgaccaaaagagacgtgctaaagcagctcccttcaaacaatacaaaggcgatccgcatgatgccttctggtatttcgataaagagatggctgacatgacagaagaacgttatcgtcaggaaagaaggaaaaaaccgcaatatcttggttttgtacaagagaacagccttcttgcatatcacccgaagtctcatgtgaaagttgccgcccgtttcctgccggaggaagatggacttacttttcatctgaaagctgtatttacggatagtctgcatacaaccatctccgacgaacattcatcgacctttcccgaaataacccgcatctgcggaccggtacagaaggtgaatgatactacttttactgttcgtttctaccgcatgggaatgtataataagcgtcgcacaggagacatctgcctcttggcgagtcatgacggtgataatcaatataaaagtacagtgcaggaacttagtttccggattccttaccgtaacacggaggggaaacgacagtatatacttttccctggcattggggatgtgaaggcaggggtggagtccgtcactcttcgggctacttccgattgcggactgcctgtatattattatgtgaaagaaggccctgcggaaatcgacggaaacaaacttgtatttactccgatacctcctcgcagtaaatatccgttgaaggtgacagtagttgcctggcaatatgggctggcgggaaaggtacagacagcagagccgatagaacgaagtttctttatttatcaataatatggaataaaacgaaagcttacggaacgatcaatcagaattaatttcattgtattgagtgttgaacagcgcttattcgtatcttattgaaaaggatataaagaatgattatgaataagaaaaatctagttgtaatagcatggttggcagtgtcgactatgatgtccgcccagtctgtataccccggtcagcatcagggaaaaatgaaaaaagagacagtggctccaattcgggtacagagttttgatttaaaggatgtccgcctcttagcgagtcgttttcgtgataatatgttgcgggattcggcatggatgacttctcttgatgtgaatcgtctgttacatagcttccggaccaatgccggtgtctttgcaggtcgtgaaggcggctatatgactgtaaaaaaactcggtggctgggaatctctggactgcgaacttcgcggacatactaccggacatttgctttcagcttacgcattgatgtacgctgctaccggaagtgagattttcaaacttaaaggagatagccttgtaaatggattgaccgaagtgcagaatgcacttaaaggaggatatttgagcgcatatcccgaagaactgatcaaccgcaatattcagggaaagagtgtctgggcaccttggtataccttgcataaactttattccggtctgatagaccaatacttatatgcagataatcagcaggctttgagtgtggtgaccaaaatgggcgactgggcttataacaaactgaaaccgcttagtgaagagacacgccggttaatgatacgtaatgagttcgggggaatcaacgaatcattttataatttatatgccatcacaggcgacgagcgttatcgttggttggcggaatatttctatcataatgacgtgatcgacccactgaaagaacttcgggatgatttgggaaccaaacatacaaatacatttatcccgaaagtaattgcagaagctcgcaactatgaattgacacagaatgagacgagtaaaaaactttcagagtttttctggcataccatgattgaccatcacacctttgctccgggatgcagcagtgataaagagcattttttcgacccgaagaaatgctctaaacacttgactggttataccggtgaaacatgttgcacctacaatatgttgaaacttagtcgccatcttttctgctggaccggtgattcttctattgccgattactacgagagagcattatacaatcatatccttggacagcaagacccggaaacagggatggtaacttatttccttccgttactttccggctctcataaactgtatagcaccaaagaaaattctttttggtgttgtgtaggtagtggatttgagaatcatgccaaatatggggaagccatctattaccataatgataaaggcatctatgtgaatctgtttattccttcccaagtgacttggaaagaaaaaggactgacgcttcttcaggaaaccgattttccgaaggaagagactactcggctcactcttcgtgcagaaaagccaaggcatactactatttatttgagatatccctcatggagtaaaaatgtgaaggtacttgtgaatggtaaaaaggtgtcagtgaaacagaaaccgggttcttatatcgctattacccgtgaatggaaagatggtgaccgtattgcggccacttatcccatgcagatcgaactggaagctactcccgataatccgaataaagtagctttgctgtatggaccgttagtacttgccggagaacggggaacggaaggaatgcaggcacctgctcccttctctgatcctgctctttacaacgattattatacttataattttcatgttcctgccgatctgcgtacatcattgaaaatagacgtgaaacaccccgaacgaacattgcaccgtgtgggaaaagacttgaaatttactacggagcaaggagatgtgatccgtccgctttatgatttgcatcaccagcgttatgtagtgtattgggatttacaagattgatttaatttaatgaacaggcacgaataaattattcgggtgcattgagtaaatacttccgcctcttcgtatttgtctattagcatcagcaaatacggagaggcgactttttagataaggaaccgctctcttttggagatttttgtgtatgtttgtcacatgtttaatatgataaagcccgttggcaggtgaaaagcacgattaaatatttggttcttataataatgtgttgggtttgcggggaaaacttgcaggcacaaccctatatgtttcgtaatgttgttatgtccgacggcctttccggtttgttggtgaatgctatttataaagactcggaaggtttcatctggttggggacagacaacggcctcgaccgttttgacggtgtgaaggtgaagcatttcgaattccgcggagtagattcgggaagaaagaaacgggtgaactgtattacagaaaccgataacaagcaactatggatcggaaatggaatcggactctggcggctgaatcgctccggtagtgaattgcagagaatcgttcccgagaagatcgactgtgccgtcaatgctttgttggcaaatggagatgtactttatataggtacggagagaggactgtttattcagaaagacggtcagttgcttcaggtacagaccgataaaaatatgctggcagcctgtaaccggatcatggacctctgcctgaatgaagataagagtgtcctttggttggcaacagtgcaagggttattttcttattcgctgaaagatggtcagatcaattcctggcatttcagagagaatgttcccgaagccgattatttccgttgtctgacccgcataggtgaaacgctgtatctgggtacaatgagtcagggagtcgtctgtttcgatatcccgaaacagacatttgcccatacggtttctttgggatgtgatgtgatatctgatatttccggtgatggaaaggagacggtgtacatcgctacagatggaaatggggttcatttcctttctcacaaagaccggaaagtggttcgccgctttttccatgatgtgaatgataaagaagggattcgcagtaattctatctactcactactggtggatgacaggggtgcagtctgggtaggacatttccaagccggattggattattcactgtatcaaaacggactgttccgtacgtacgcttatcttcctcagtttaactctgccaatttatcaattcgttcgttcgtaaaccggggaccggagaaagtgattggttcgcgtgacggattgttctatattaacgaagctaccggcatagtgaaaagtttcgtgaaaccggttcttacgtccgatctgatccttaccatttgcttctatgaaggtgaatattatatcggtacgtatggcggtggtatgatggtattaaatccgcagacgttatctctcaaatactttacacaaggtgatacggaactcttccagaaaggacatatcttctgtgtaaaaccggataacaggggaaatctttggattggcacctcgcagggactattctgttacaacgggcagacaaagcaaatcaaaaacttcaccagcaccaactctcagttgcccgaaggaaatgtgtatgaagtaagttttgactctaccggaaaaggatggattgctacagaaaccggtatgtgcatctatgatccggcctcacaaagccttcgttccaatgtgtttccggaaggatttgtacacaaagataaagtacgtactatttatgaagatgcagaacataacctttactttatccgtgagaaaggcagcctgtttacttctaccttaacgatgaaccatttccgcaatcaatcagtactttctacgcttcccgataactcgctgatgtcaataacagaagataatcaaggctggctgtgggtaggctgcaacgatggattgttgcgtattaaggaagaaggagaagagtatgactccttcaccttcaatgacggagtgccgggaccgactttcactaacggagcggcttataaagatgaaagaggactgttgtggtttggcaataccaaggggctgatctatgtagatccgaaacaggtagatgaggtacgtggaaaggtccgtccgattgtctttacggatattctggctaatggagtttctatcaataaatcgtctttgaagtataatcagaacaatcttactttctgttttaccgattttgcatatggattaccttctgccttgttatatgagtataaactggagggagcggacagtgactggaagttgctgacagcacagagtgaagtatcgtattatgggctttcttccgggacatacacattctgtgtacgtattccgggcaatgaacaatcaatggccatttataaggtgactgtgcagccgatgattccttggtggggatgggtgattctcgctatatcgattattctgatcgttgttctagtgagatattatgtgcggaaatctgctccattggtcacggaagtacacgagatctcatccgaagaagaagaggaagaagaaaagacggcggaaccacatcctgcagaagaaaaatataaggccaaccgtatgagcgaagccgaatgtaaagaacttcatgacaggcttgttgcttatgtggagaaagaaaaaccttatattaatcccgacttgaaaatgggagaacttgccgccgcattgcatacttcttcccattccttgtcctatctgctcaatcaatatcttaatcagtcatactatgactttataaatgagtatcgggttgcccagttcaagaaaatggtagaggataatgattactcccgttatacattgacagcattggcagaactatgcggcttcagttcacgtgcttctttcttccgttcattcaagaaaagtaccggagttactccgaacgagtatattcgcagtatcggaggaacggctaaagatgaatagtaaatgtgctcccttcattaagatattatgcaggtaagattaatgtattcggtcagtaacaagagatcgtttcacgtatgtgattccatcggttcatgtacgtgattcattgggcttacgtacatgagctgaacggttcacgtacgtgaaatgaatacatgaaagcacctgaatatattagtcaagccttgtttgtatgttaagcttctcagcctttgtcttaatacatgcagcttacatagaacaatattgggcgtaaacaacgtacattcatggcaaaaatggtgtttttaacattggtagacgttacccttgaatagtctgtctaacacctgataatcaattgaataaatagatcgtttatcaaaaacaggtgataatagaaatcaagaactattctattatcaccttattatcaccatctattatcacccttactgctttaattataagacacttgtcctgccaaggtgataagtgacaataaccaaaggctttttatttcccaggttactttgctcaaattgatgagatgtgaaccatcggtctgcttattatgcccaaacggagtctcattttataaagtgagactccgtttaaaaagtgtgtaagtgattgtaattcatttgcttaaataaaataaagtctacctagatgcgttgagattcatctcccttgttttttgaaatcattctccggaattgcctttatatttgcatcgtgttcaaaaccgaaaaagatagtattatggagacaacagcttacacttccgacaacattatcacccgttcttacgaggaatatcatcaggtaatcttaaactatattacctatcggattgctcaccgttatgaagcggaggatttaactcaagatgtatttgtgcgtctgatggattacaaacagatgctccgtccggatacagtaaaatacttcctttttacgatcgcacgcaatttagtgaccgactatatccgtcgttattataaaaagcaggagatagatagttacctctatgattttactgtcacttcttccaatgatactgaagagaaaatcattgctgatgatttgatggcgatggaacggacacggttggcagccatgcccgaacagcgacgactgatctatacgttaaatcgttttgaggataaatcttctccggagatagcctccgaattagaattgagttgccgtacagtggaaaaccatctttttctcggacgccgtgatatgcgtgacttcttccgaaactgtatataaaattattcatataataaacaacctttggtgcttatggaaaaggaatcaatactgagtgagaggtatctttatgcctcaacaaattttagagaacaagaatttaatactatttttaaacctcaaatttaatgttatgaaacgaagaggattaatttttaattcgcaacctaataaggcggtcatagttgctttaggactgatgttgatgctgtgtccggcttcccggacatgggcttatgcaaatgttaatgatagcaggactatagcacagtctcaaaaacaagtcaaaggtcaggttgtggatgcgacgggagaacctgttattggtgcaagtatactcgagaagggaactacgaatggagtaatttctgatattgatgggaatttctctttaaatgtaagttctccgaatgctgtgattgttatttcgtatattggttttaaatcaatggaacttccggcttccgatcctaaattgcggaagattataatgaaagaagacactgaagtactggacgaagtggtggttgtaggatatggtactcagagaaaggaatctttaacaggtgctgtaaccgttgtaggagccaaacaactggaaaataaaggtacgatgtcaagcccgttgcaggcaatgcagggcactgtgcccggagtacttatcactcgtaattccggagctcctggagatgagagttggggtatgaaacttcgtggagcgtcttcatccaactctactgatccactcattattgtagatggtgtggaatatagtgacggtatcaacggtatgcgcaatttgaatccggatgacattgaatctatcaacttcctgaaagatgcttcggctgctatatatggatcgaaagcagcgggaggtgttgtattgattacaacgaagaaggcaaaagcgggtaaaactgttgtccagtataatggttcttttactggaaaagtggtagggcttcaaccggaattgatgtcgttggatcaatgggcggatgcagtgattactgctcagactaatgatggctattctgattcaaactggattcgctatgccagactagccaaattgtataagaaccagtacattgatttgagtcatagtgcacacccgattcccgaaggattcaaggatgtggaagactttgtctttatggataatgactggcaggatattttatggggaaattcatggtctacacaacatgacctcagtgtctcaggaggtacagagaaaaacttgtttcgtttgtcactgggatatatgtatgacaacagtaccttgaaatggggaaataataacaatcaacgttacaatatgcgtttgaacaaccaatttaagctatcggatgctgtgatgttgacatctagtatcggttataaccgtcaggatcaagtatctcccagtatgatagggaaagttctttcccagtcttccccacaaccgggtttgcctgcttctactatcgacggacgtccctatggatggggaacgtggcgtgcattgaactggtgggctgaggaaggcggagacaataaactgaaggtttcggctatcaatatcagcgaatcgttgaactggaagatatattcggatctggatgccgttgtcaatgtgggctataacacttcaaccgctacacgtgagaaagtagagaaatctattgattggtataattatgcaggcactaaattgttggcgacagaacctactcaggaaaagagtaaatactctgattctttttcaagaacagactactatatggtttccggttacctgaattggcacaaaacattggcggaagtacataatctgagtgcaatggctggtacacagtataattacacacagtataaatatacttttgtatctgtaaaagatatcaatccgtctttagagataccaaatggtgccggagaagttctgataaaagatggagacagtaagcctgcaaaatggcatgaggcaatgatgtcctatttcggacgtttgaactatgattataaacaacgttatttggtggaaggcaatctgcgatatgacggttcttcaaagttccgtcccgaaaatcgctggcaattcttttggggagtatctggaggatggcgtttgagtgaggaaagcttcatgcagccgttatcttctttggtcagtaacttaaagctgagactgtcttatggtgtattgggcaatcaaagtggcgtagatcgttacgatggtactcagttgtacaatttttcttcgtctagcggagcatatattggctctggaaaagtttcgactattgatacgaatgggaagattgtaactacagaccgtacttgggaacgtattcatagttataacttggggctggacttcggattcttcaataaccgactgactggtactgtagagttatttatgaagaaaaataataatatgttgattgatgcccagtatccgggtgtgttgggagataatgccccaacgatgaatcttggaaagtttgaggctaaaggatgggaaggaaacatgacgtggtcggacaaaataggacctgtacaatatcatattggagggactataacttatactactaataaattgattgatttgggagcaacttccgttctgaaatcaggttttgttggtaagcagcaaggttacccgttgaactcatattttggattatgctatgtcggtaaaattcagacccaagaagaactggaaaaatacaaatattactatttggatggcaatggaattggaatgcaggataatcttcgtctgggagaccacatgttcgaagatgtgaacggtgatggcaaactggatcagaatgattatgtatatttagggacggatgatccgaaactttcttattcaatcaacatcggattggaatggaagggctttgatctctctgctatttttcagggagtggggcgcagaacagttttccgtggtggtgaaggaaatgaaacatggcgggtaccgatgagtgctatttacttgaatactacaacccagtccatcggtaatacatggaacccggagaacagaaatgcctattatccctcttatacaagcattggttctataaataattataattatcagtgttcttcttggtctgtagagaatggagcctatctccgtttaaagaatctgactttgggatatacgttacctgcttcatggttggccaaaacaaatgcgatcagtaaactacggatatactttacaggggctgatttatgggaacatagtaagttaagagacggctgggatccggaagcttcacgtaaaactaaagatttaggacgttatccttttaacagaactttcacggtaggtgttaatgcaactttttaaatagaatagtatgaaacgatcaaaaataacaattctccttgccatagtgttaggaatgacattccactcttgtttggatctggaacctcaggatcagttgggtggtaagaatatgtggacttctgtcaatgattataagcagtttgccaataccttttatagttggacgcgtgatttttcttctgtcgtatatgatggaacacatagtgacaaacgttcggatttgattacttatcagagctacaatgaatttagccgaggaataaattcaattccgtcttcggacgccaactatacggataactacaagcatatccggcgcacgaacttattgttgcagaatgctgaagcttatgctaagccggaagatataaagcaatatataggagaggcttattttttccgtgcttatagttattttgacttacttcaattgtatggagacgttatcatcaccaagaagccgttggacattacagaccctgagatgaaagtaaaacggaatgaccgcagcgaagtagtcgatcttattatcgatgatcttaatcatgccgttgaaaatttaccggcttttaaagaacttacgaccgaagaggaaggacgaatttctaaagaaggtgcacaggctttcctttcaagagtggctctttatgaaggaacatggcagaagtcgcgtaatggtaatcagaatacgcaacgttccgctaatctgttggacatagctgccaaagcagcacggactgtgattgatgctaaatatggatacacattccgattgtttggaacagacagtgagacaaaaatactgggtgatagtgcgcagaagtatatgttcattttggaaaatgagaagtcaaatccggcaggtattaaaaagtcttctaatcatgagtatatttttgctcgtcgtcatgatcaggtattggcctcaatcggtaagaatataactcaagaatgtctggcaaatgtgcaatgggtcactcgtaagtttgccaatctttatttgtgtgatgatggattgcctattgagaaatcggggcgcttccagaagtatgataaaaaggtctctgaatttttgaatcgcgataatcgtatgcgttatacgttgctgaaaccgggtacccgctattgggggaataaattcggccgaacttcgtggcagtgggatgagacggatcttaaaacatccaaagtctatgatccagcttccggtacatgttatggcaaccaaaaatggagtgctgaacgtgtggtacccgatacgcaagagggatatgatttcccgcttatccgttatgcggaagtcttgttgaattatgcagaagccatatatgagagagatgataaaattgaaaatgaagacttgaatatttccttgaatctggttcgtcaacgtgtaaataccaatatgccggcattgactaacgagcttacacaggcacatgggttggatatgagaacggaaatacggagggaacgtactgtcgaactctttaatgaaggatttcgcattgatgatttgaaacgttggaaaacagcagagaacgagatgccgcagactatgttgggaattaaatggaaggggactgaatatgagtcctggaatacaacctttagtttgaatgatgaaggatgtgttgttgtagagactgggcgtcagtgggcggataagaattacttgtacccattgccttctgatcagttacagttaaatccgactttgggacaaaatccgggttggggagaataatggaatatgaataataaaaaagaaaaaatatgaaacatatagctttcttatcagtaaaatggatgtcagtaggtcttgggatgctaagcttattactgtcagtagcttcatgtggcgataaggaatatggtgatgctatgaatgaggcgcaactaatgaatgatatagaggtaaatgtaggttcatcactacctttagctgtaggaatggattttgttttagattataagccggttccggagaatgtgacgaatccggagattactttaacatcatcggatgaaaatgtggtgtctgtttcgcaggacggtagggttacggctaagatgatcggaaaagcatatattaatttgtctcagagtaccgcctttgagactctcaaaacaatagaagtccaagtaatgccggtggctacagctatagagcttgaaaacgtggaactgtttgaaggaacaaataagaaagtgattgtcaatgtgactccttcagacggatataatgtgtttgattggaaaagtgataatgaagaagttgcaacggtagcggacgatggtacgataacggggaaaaagcctggaacagctaatatttcagtttcaagtcaagatggtagtcaattgactgctacggctgtagtaacagtaaaagaagtgattcctattgataaaatcacattaagtgaaccgggatatgatatgatgataggagataagactctgataaattgtcttttggaaccaattgatgcatcggttggattattaagctggagtactaccaatgacagagttgccacagtggatgctgatggcttggtaactgctgtgggtgcaggcgaagccgaaattatagctcaggatccattgtccggactatcagcatcgatagctgtcaaagtagttggtgaaggagtagtctcattgtcactatcttatgttcgtaatcaggatgaactgaaagcactgggatggggatttggacaaacgcccgcttcggtcaattttgatgctgaaggtatgactgtaaatatgtctctgcaatcgaacagcaaatatagggcagacttaaagatggcttctaatgaccgtccggttgtcttgaatataggaacttaccgctatcttgcctttagaatggatgtgccgggtaacggaagtcttaagttggatacgaacaaaggtgattatggtaacaatccgaccggagttttggctgaagattcgcaggttatatattatgatttgcaggctaagccctattttccaacggatgctccatcggataagttgacgactttccagctgaagatagcggacgttactgtacaaccttattcttataaggtatattgggtacgtactttcaagacattggaagatttaaaagtttacgtagaaaaagaaaataacaaataaatctgaaatatgaaaacgaaatatataagcttattctttagctttgtgatagcatttggtatgatgtcctgcagtagtgaaattcccaatggggataccagtaaattcagtgatttgaaaagtcctgaagaagatatggttaagaaagactatttgccattgaagcatccttgtatgcttcatacacaggccgatattgatcgcgtaaaaagtaatctgacacgatcgccctggaaagaagcctacgctcaactggaagcaagcgattatgcgcaaagttcttatacagaaaaaacgagtgctttgcttgatggatatttgaaacgaatggataagaataattggtcgggtaaatatccggattactctaattacacatcgtgtatgtatgatgctgcggctgcttaccaactggcactccgctatcagttgtcgggaaataccgtatttgcagatgctgctgtaaaactgtttaatgcatgggctacgaactgcaagggtatattgagaatggaaggttatactaataatattccagaccctaatttatatttgatacctattcaggcacatcagtgggcaaatgcggcggaattgctcagagattacaatggatgggataggaatgattttgagaagttcaagacttggatgaaagatacgttttacagtgtttccaatatgttccttaagaatcataacggtggacagggcaatatgcattactggctaaactgggatctggctcagatgacatctattctttccattggaatattgtgtgatgataatgtgctgattaatcaagctatcgtatattttaagaatgaagaaggaagatataaagaagctggaaatatcaaaaatgcagttccttttttgcatcaggatccggattctgatgagattttgggacagtgtgaagagtcgggacgtgaccaagggcatgcgacattgtgtgtgtcattgatgggggcattctgtcagatggcttatagtatcggtgaggacctgtttgcttttgataattatagggcagtagcaatggctgagtatgtaggcaagtacaatctgatcaaagatgaagccttcaataaaggaacattagttggtgatgattttgtatatgattcccattctttcccctatacttcctattcaaatccgtcttataccaatgcaactatatctacagaccagcgcggaacgaaaagaccggcatgggaactgttctatggatattgcaaggcaaaaggtatatcttccatttacagcgggaagtgggcagagcaaatgcgccccgacggaggtggtggaaactatggaccgaatagcggtggatttgatcagttaggtttcggcacattgatgtattaccgggaatgacgatacattttggaatatttttgcgaggggattaggtatttacctgatccccttcgtatatataagcaaataggtcagtaataagattgttgaaaagagataaaggattcagtttttaaaagattggttttaatataaggtaaaaagaacctgtttttaggaataacgattagtatgtttgaatgaaatgattagtaaggtaatatgcgtaaaaagattctgtttatagcaggaatgatggcttgctgtacttgggcgagtgcacaggaaatatcccggacctgggtggctgataaaggcaatggtacttatcagaaccctgtgctttatgccgactattccgatccggacgtatgtgcggcaggagatgatttctatatgacggcttccagttttaattgcataccgggacttcctatacttcattcccgtgatctggtaaactggtcgctggtgaattatgcgctgccggtacaggaacccaaagagtttttcgataaagcgcagcatgggaaaggtgtatgggctcctgctatccgctttcataagggagagttttatatttattggggcgatccggattatggaatctacatgataaagaccagagatccgaaaggatcatggagcaaacccgtattggtgaaagccggaaaaggaatgatcgacccgacgccactttgggacgaggacgggaaagtatatctgatacatgcttatgccggcagtcgcagcggagtgaacagcattctggttatttgcgaactgaatgcggaaggaacggaagtgatctccgatccggtaatggtgttcgatggaaatgacgggaagaatcatacggtagaaggaccgaagctctataaacggaatggttactattatatttttgctccggcaggcggagtagctaccggttggcagctggtgcttcgttcaaggaatatttatggaccctatgaatcaaagatcgtgatggcgcaggggaagaccaccatcaatggtccgcatcagggaggctgggtagatacaaatacaggagaatcgtggttcgtccactttcaggatcaaggggcttacggacgtgttattcatctcaatccgatgaaatgggtgaatgaatggcctgtgatcggagtagataaagacaaagacggttgcggagaacctgtcaccacctataaaaagccgaatgtcggaaagatgtatccggtaactactcctccggaaagtgacgagttcgatacacggcacttgggattacagtggcagtggcatgccaacaaacaggatacctacggatttacgaccgatctgggatatatccgactctatgcaggcagcctttccaaagagttcgtgaacttttgggaagtgcctaatctgttgctgcaaaagtttcccgctgaagagtttacggctactaccaagctgacgtttaccgccaagcaggatggagagcaagccggaatgatagtaatgggatgggattatagttatttgtctgtccgtaaagccggcgacaagtttatcctgcaacaagtcgtatgcaaagatgcggaacaacagcaccccgaacaagtgaaggaactggcgagttttccggtggaatatctgaaaatgccgggagtggctgataatgagtggaagaccgtttacttacgggtaaaggttgccaagggagccgtttgcacctttgcctatagtctcgacggaaagaagtacacagcagcgggagaaccttttactgcccggcagggaaagtggataggagcgaaagttggtttattctgcgtcactcctaatgacggaaatcgcggatgggcggatgtagactggttccgggtaactaaatgataagaaagaataagtgagaataaaaaataagaaactaacacgaagatatagaacgaaaaaatgaagaagattgtagcagggttggttgtagtactagggttttgtgcatgtgcccatcggacttccggtacgttggatgtgaataaagctctggattattgcgcggaacagacccaacgttcactggtagaactgaaaggagactcgggtatagactatacaatgatgccacgtaatgtcatggcagacgaacatcattggaactgtcggaaagcaacgaaggaagaatggtgtgccggtttctggccgggagtgttgtggtatgattatgagtatacacaagacaagaatatactggaagaagccgaaaagtttacggcatccttagagttcctttcccgcattccggcttatgatcatgatctgggctttctggttttttgcagctacggcaacggatatcgcctgaccaagaatcccgcttacaaacaagtgattctggatacagccgattcattggctactttgtttaatccggtagtcggcacgatgctgtcctggccgcgggaagtagaaccccgcaattggccccacaataccatcatggacaatatgatcaatcttgagatgcttttctgggcagcaaagaacggtggtaatccttacttatacgacatcgctgtatctcatgccgacaagactatgaagtgtcagttccgtccggactatacctcatatcatgtagcggtatatgatactatcacaggtaacctgattaaaggagtgactcatcaaggatatgcggacagcacaatgtgggcacgtggacaagcatgggctatttatggctataccgtagtctatcgtgaaacgaaagatcccaaataccttgactttgtgcagaaagtagccgatgtctatctggaacgcttgcccgaagacaaagtaccttattgggatttcagtgctccaggcatacccgatgttccgcgtgatgcttcggcggctgccgtagttgcttccgcactgctcgaactgtctgcctatctccccaatgggaagggcaaacactacaaggatgccgctatcgaaatgctgacaagcctgagttccgacaattatcagagcggtaaaagtaatccggctttcctgcttcatagcacaggccattggccggctcattcggagatagacgcttctattatctatgcagactattattatatagaggcattgcttcgtctgaaacgcctgcaggagggagaaggagtattgggatagaaataaaaagggggatgtgtcagacttcccttttaacgaaatcatcctcgccacagatagctgtagcgaggatgattttactggttaggatttaggttgttatttctttaccttgatgatgtcataattcaaatcgctgacagcttcctgcaggctatcgtttaccaaacgcagggtagtgtcatttacaatcacaaaatacattggagcctcaccatcattcggagttaacttaacagctttggtaggttttttgttcactactttttggatagtctgttgttttcctttagaagagaaggttttattcttaccctgaccttctgcatcgaggtaagtcatatccagtgtatacgtggtatctacaccgtcagttgcagcgttcagagtcaatacgtagtcgatacccggaccgtcggcagcagggagtgtaccttcataaacttcggtcacttctgtgatcggagccatttctatagaaagactgtctgcttctgcctctgcggctttgttggcttttgactggcaagatgccaaagcagctacgactgctgctaacataattacttttttcatcgttaagtgctttaagttaatataaatatagtgagcttactgctcgggttattttttctttattcttcgtcccgtttgatgaccagcagtttgtctacccgtccacggtccatatccactacttcgaattgcaggttcttgtaggtgaagatatctccggctttcgggataccgcccagcaggaacattgccaatcctccgagggtcgtgaagtcttcgtcctccaggtcttcataagataagattcccatctcttccataaagtccttgatgttcatcgaggcttccaccagcatcgaaccatcctgtcttctgacgatatcttcctcttccgtatcgtcttcttcaaggatatctccgaagatgctttcggtaaggtcgtgcagggtaatgataccttctgtactaccatactcgttaacaacaactccgaacttgtttttgttcttcttgaacagctctaaaattttatttgcatataaactttcggggataaacagagccggacgggctatttcgcgcagattgaactcctttttatttcctaccatcagaataatatctttgacggataccacaccgataatctcgtctttccgctcgtccaccaacagatatttgctgtagtgttcttcttcgattgtcttcatcaccttgtcttttgtatcgtcgggatggaagatgacaaggtctctgcggtgcgtcatcagttcattggcacgtttgtccgagaaacggaacacatcacgcagcatttccgtctcttccttgtcgatcactccctgttcggagctttggtggagaatcattttgatctcttcctgtgtcatcgggcgttcttcgttttttacgccgatgattctgttcagcaggcgggtggagatactgagcagccagacgaacggataggatactttcgtcaataaaatcataatcggactgaacaaggttgcgtatcgttccggattactgagggcaatggatttgggaaccagctctccgatgataagagagagataggtgatgattaccacagtggtgatcatggccagattacgtgcataggcttccgctcccggtatgagggagaagagtggaacaaggtcgtctgcgatagcgacaccaccataggcaccggatacgataccgatcagggtaataccgatttgaatggtggacaagaacttttcgggttcttccagttgtttcagtactccacgtgcagatttgttgccttttccggcgagagtttcgagacgtgctttgctggatgataccagcgcaatttcgtacatggcaaagatgccattcagtacaagtaagagaagtatgataagaaattccataaatggatttaaatgattattgccgtgaaattacatgaaatcacgacatcatgcaaatatgtgctgtatattaatgattttttaataaacaattggtgcggaatggcgatgtattctttgaaatgaggggggcttaagaacaaaagaacatattccgaggttgcaaagtaaatgctctcggaatatgttcttttgctatttctgatcttgagtcttttttattgtttgtatttatcagccagttctttagcacgggctacacgtttggcagtgtcggggtgtgaagaaaacattctctgcatgtaggaagatgcgggagccccattggacaattcgagaagtttattcagtgatttgtacataccataagggtcgatgttgttttttacgcagaactctacgccgtaggcatctgcttcgtactcttgtttctgtgagtattgtgcgccggcaagtgcttctgccattgctcccagttcagagtcagtcagtttggcgacctggctgctggctgctcctgccgcattctttacagccgaacggaaatatgcattcttcattgcgtctttagagtcggtatggatgacatgaccgatctcatgaccgattactgccattacttcttcgtcagtcatgacgtccatcagtccggcacagatacgtacgctgccgtcaccacaggcgaaagcgttaacgtccactacttcatatacgccaaagttaactttcataccatctacttctttgatgtttccggtcagtctttccaggcgttttccgtattcgctgtccggtttggtcagtgggttatgcttgtccatccattccatatactccttgctcatagcagcaatgtcggcgtcagatagagagattgcttgtgcggcatcttttcctgcttgaatagctttgcctaaattgaatttcttgaattgtgctgaagcgttaaaacaactcatgcccaaaaataacagggctactaatgcaatttgttttttcatcatagtgaatttttagtttgttattatataatatagtgttagtattcaaacgtgattcccaaagtcggcagcagtgtaccgctttcttgcttgagcgacttcatgacataccgttgttcggctatcggtgcgtccggatttttgattactccggtgctcattaatacatctgcctgtttcagcttgctgcccgcgatattctgcagatcaatgtagaaacccagcatacagcgcttcagatagaatgttttgtctatgcggatatctacctgagtgaaggccgggagccgttcttcattgtatcgggtatagtcgtaatacggttttccctgtgcattccaggctgttaccagagatgacttgtcggcatcataaggagtatagggggcaccgcctatacagctgactttcattccgacgctccagtgccgggggagattgtaagttccccgcaagttgaaaataaagcggttgtcccatgcggaagcgatgtattcgctttccttatcagtacgatattcgcttttaaagagcgtgaaagatgaggcgagattcagtttcttggcgaccagccatttaaggagaagttctgctccgtaagaccgtccctgtgcggtggaagtaagcagctcgttgccaatcactccgtaatcgtttcctttgcaggtcaacggaatgccgtcggctacggaaagaggaattttgtcataatctttatagaatccttcgacggatacttcgaaggtatcgccctttctccagttcagtcctatgctaccctggctgacttgcatatagcggagcgcatacttgttggcatagagtccgttattgtttttaaagccgagagcggtgtagggaggcagttgataatagagtcctgcgtttccgctcagcgaccagtgctccgtcagttgataggagagtgacaggcggggagagagctggtcggacaggtctttcatggctgccgagtagttgttggcatcggcacgcagtcccagagaagccgtaaaacgctcgtctatggaggtgtaattgatcgttccgaaaagtccccagcgcatgatgcccagataggtatggtagtcgaacgtctgcgcacggtcggtatataccttctgaaaggtggtgttgctatactggctatagtccagactggttccgacagtgactttccagttgcggaaggacgaactgttctcaagacggagctgagtattttgttccgtagagcggaggcggagcatcagatgatccggatcgctttcgtcgttctgctgatatttggtgttccggttgttcagataactgtgactggcaacgaccgactgcacgtgtgcccccgcatagtgccggtatacggcacctagagtgaacgtctcctgctgaatcttaggcaggtaactgaggatgtattcgttgtcttcatcgtcggctttggtgtttagtttcatcttatcaatgccgcccagccctagtacagtcaattcattccgggcgtcaaaccttgttttcagcttgaactgcgcatccgtaaaagtcggcagaaagggcagcccgagcatatcaaacaagaattgcaggtaggactgacggacggaaaccagataggaagtctttttgcccaaatgtccgttggaggcaagggagacttcggaagctccgagagtagctttcagggaattgcgttccatgtccccgtcgcgcaatttgaagtcgagcacggaactgagcgcatttcctttgtctgtcgggaaggctccggtatagaagttcacttcccgtatcaggtcggcattaaggatacctaccggaccgcccgatgctccctgtgtgctgaaatggttgatattagggatctctactccgtccaggtaaaagcggttttcggaaggcgatccgccgcgtacgatcaagtcgttacggtatcctatcggtgagaaggcaactcccggataagactgtacgatgcgtgagatgtcccggttggctcccggacttttttctatttcctgcagtccgatgatgcgcaggctgaccggactttcaatgtcccggcggaaaggggaggcggtgacggtcactccttccagttccgtctgattctcttccatctctatttgtatatgtaggtctctggtcgaaagtatgtattcgggggtagtgacagttttgtatccgatagcggacgcttgcaggcgatagatgccgggcggtacttgcccgatcgagaacttaccttcggcattcgtcactccgcctttattgagtccgacaatcattacattgataaattccaacggctgacggctggatttatcaatgactgttcccttcacttggtggacaggctgtgccagaaggaaggatatggttatgttgcaaaacagcagaagcgacagtagtcttttcatgttatttgtagtttagcgactgcaaagttaatggaaaatagtttcacatttcaattttatgttctatttttgtgggaataataaaatctggttaagtatgaaaaccgtaaaattgattacctgtaatgacgcgatgaaggcgcatatccttcaaggagcgctggagaatgagggcattgaatctattctgcataatgagaacttttctactttgtataaaagttgcgtgagcagtattgcgggagtggatatcctggtggcggatgaagattatgagaaagccgttcaggtgctgaggcagaaccaaagctggcccgaagaactgacgctctgtccttattgcggttcgtccgatattaaattcgtattgagaaaaggacacaaactgcgtgccgttggtgcggctgtactttccatgctggcagcggcgcctccgggggacaatcattgggaatatacttgccagcagtgtcatcagacttttgagacacctgttgccgaatttcaaccttcgggagaagacgaagaatgattggatctaaacatattataaacacaatgaaaaagaaaaaacttctattaatcgctcttttgttagttggggcagcgtcttcttttgctgccaaagtagatacgttattagtgaaaagtccttccatgaacaaggacatcaaggtagtagtagtcactccggatgcggcattgggaaagaaagctacggcgtgtcctactgtttatctcttgcatggttttggcggacatgccaagacgtggattgagattaaacccaatctgcctcagattgcggatgagaaaggaatcatatttgtttgcccggacggaagtaccagctggtattgggacagtccgaaagacccgtctttccgatatgaaacttttgtctcatcggaactggtgaagtatatcgacggacattacaagacaatcaccgaccgcaaggggcgtgccattaccggtctgagtatgggcggacatggtggtctgtggactgctatccgtcataaagatacctttggcgcttgtggaagtacaagtggaggcgtagacattcgtccgttcccgaagaattgggacatggcaaaacgcctgggggattatgaatctaacaaggaaatatgggatacgcatactgtaatcaatcagattgataagattcagaacggggatttggcaattatctttgattgtggcgaggctgacttcttcattcaggtgaataaggatttgcacaaccgcttattggaaaagaagatcgatcatgattttatcacccgtcccggaggacataccggagaatactggaataacgctatcgattaccagattttgttctttgataaattcttcaagaaataaaaccggaaaagcttgacttttgcatccggatgtcgtatctttggagacataatcatatagtagattgaaattaaactacgatagaaggaggaagtgaaaactttctccttttttgtgtactacttggtgaggaactgttcagatcggtgctgggagtggttcagctcggtgcttattgaaatttagaagggatgtcgggaagaattagaaggtatgttaaggcaaattacatactatgttaagtgtaatcagatgctttgttaggtgaaaacggaggctttgtttcgataaacagacttttatgtagcggaaaaggctagtcggagttaagaatctataaatctgctcttgacaagaatcgggttattcaatcgtaattgagatcgtgcgattcagataagatatacttttgccattaccatatttagtgctgacctttagactgacaggtttcttgtttttatcaaagctataagtatattcggttctttcggtgtatgtgtcactggttttctccggataagaggcggtagtaaggtgttgtgtcggtttgccaagcatgccggcaaacaaggcttcacgatggaaggaaaggggataagtatccgccaccagcatacagggaagacgataataattgatatcttctcccgcttcataattagtctgaagctttccgtaaccggtggatgattcatagggcagtgaaggagagatggtggaaattaaatcgcccttgtcatactgtagagaaagagtgtgcgcgacaactgcatcgctgcttccttcccggggcataatcttttcattcacttgtgtcagatagccgtccgtatatgaaaaggtatattgtctcttctggtcgagagaagcatattcgcattgcgtggcgtatccttcttcgtttagggtgtatttacgctcagtccctatttcgtctgtgaaagtaacactgcttctgttgtttccgtattggatggtaagcggatggctgatgatctctgtcaagtccgctatcgaaacttcttgcgtgtaggtataaccggtcagccaggcatcttcgtagcgaaactcttcttctttagtaacgtcagatactccgattccatcggacttgcaaaattcggagaacagcatcttgcttatttccgggtcaggaacttctgtgcctgctttttcttcatcatccgaacaaccgaacattactatcgcacacaacagaagtgctatctttttcatacttgtttatttaatccgtaaccctccggcaaatcttctgctggcaggactgctgacacttttttctatcttaatactcttggtacttcgagtttcttcttctttgtcttcgtctttcggcggataggttccctccaatgtctggatggctatgcttagcattctttctttaggattgccgaaagggaggaactggctgtaatcagtagtcccgttaatagacgtttcgcttattttgaatttatcgctgggaacaagcacgaatgcgtcttcgcctgcatcatggtcggagttgtaaacggtgcataccaccggattgacagaccaacggtaggtttcgttgatgaattgctctgtagccactgtttgtcccttgcttgcgctacccatgacaataatgttaggagcctgatcctctttgtataggctggtcagtagcatttctgctgctccggctgttgttccgctggtgattgttaccaaagtgttttgattcagattgacaccggtcttcagcacctcctgatcgaaattgatggtcgcgtctttgtccaagttcttgtcgttatattccagataagccatcggagtgcccattcttgtatttggcacaaggatggtggcaagtaactgaacacagtccagcgatcctccttcgttatagcgaaggtcaaggatagtggcttgtacgttggcttcctgaaatatcgttgagactttacgtaattcattattatacttctccggatcgtcattggttccggcggtgaagctgttgtacatcagatagccgactttagcaccattgtctaaagtcagaatttcgtatttatgtaccggttggtcttctatagactgggcggctcccaaatccagcgtgacaccgttcggcactactttatacaccataaccggttcttccggtacttcttccccttcttcgggctcttcctcgacttctttccatacccccatcgaaagttctcttgctattgtaccttgcagtagttgcgtttcatacttcttgctgatataggaagtgtctactttcataatccagtcaccgcgttggagtccggctttttcggcgggtgattcggggataacataagtaatcaaggcattgtatgccgtatcgttatcctgactcttgacgagcgagtagtcgaatccataggttggcaacggagcttccaggacagaatctacaaaagagtagctgtctttgtcccattttgctttggataagaaggtggcagggtcctgaaacaggtttacttcatcgtagccaggcatatattgataccacagataattctgttgcatgatatcatacatccatgtatccagttcagtcaggtgggcatattccggccagcggtccacaccacacgaaaagaagctgctgacagatacgacgatcagggcaggtataagtagtattttacgtaaattcgtcatcttaaaaagcttttcagtgtgcaaatgtaggaaatactttgcttatctaccacatttatggtataaaaatgccttcaatatgtgataggctgttagcaaatcccgccttatctttgcaacatcgaaaatgatcaataggtattcatataaatagagagagaataattagaatccaaagagagtgatatagagtaaatgatttttggatggaccgtaacctgactttgataaagatttaatgaaacagatttgctgatgtgctaatttgtcggtgattaatacattggcatcttagcacaacttttgttgtttaacgaataattatgatgatgaatatagctgcattattgtccggaggtgtcgatagctctgttgtcgttcaccttctttgtgagcaaggatacaaaccgactcttttctatatcaaaataggtatggacggggcggagtatatggattgttcagccgaagaagatattgaaatgtccactgccattgcccgtaagtatggtttgtccttggaagtcgtggatttgcataaggagtattgggagaatgtggccgcctacgcgattgataaaataaagaaaggactgacaccgaatccggatgtgatgtgtaacaaactcatcaagtttggctgtttcgaacagcaggtcggaaagaatttcgattttacggcgacagggcattacgccaccaccatccggcaggacggcaagacgtggcttggaacagccaaagaccctgttaaagaccagacggatttcctggcccagatagactacctgcaagtttccaaactgatgtttcctatcggcggactgatgaagcaggaagtacgcgaaatcgcaagcagggcaggattgcccagtgcccgaagaaaggacagtcagggaatttgctttttgggaaagattaactataatgatttcgttcgtcgtttcctgggagagcgggaaggggcgattatagaactggaaaccggaaagaaagtgggcacgcatcgcggctactggttccatacgatcggacagcggaaaggacttggattgagtggcggtccctggtttgtgatcaagaaggatgttgaggaaaatatcatctatgtctctcatggatatggagtcgaaacgcagtttggcagtgagttccgtatcaatgattttcactttattacggagaatccgtggaaagatgccggaaaggagatagatattacgttcaagattcgtcacactcccgaatttacgaagggaaagctggtacaggaagagggcggtcagttccgtatcttatcttctgagaagttgcagggcattgctcccggtcagttcggggtgatttatgatgaagaagcggggatatgtgtaggaagtggtgagataacccgataggctgttccctttcagaactgaaccggctgtcaaatatagtattccgctaaatccacaatccctgcacgcatcgcgtacttggtagcttcgtgcacattgttgactcccagcttccggaagatattctttcggtggctgttgattgtatgaaagctgaggttcttttctgccgctatttcttttgtcgtcttccccagtgcaatttctttgaggatattcttttctgtctgcgtcagcagatgatcatccaccgttgcaggggatgcggcggaagaagccgttcccgaaagcagcagattgctgacatgattgcagatataccgttgtttgcgtgaagcgcattgcagggcggacatgatttcctcttttgagttatctttcatcactactccgaaagccatactgctgaataatacctgccggagaaaattgatacttaactcatcggagaacagaatccagtcggcctctttaaaccgctcctgcaggacgatcagttcgtccgctccggcaaaatcgaataaggtataatccagaataaccaccgcttgcggatacaagcgcagctgctgaatcagttcggccttgttgtcagcttctaaaagaacggatacatccttttgccggcttagcagaaacatcattcctgccttgctgatatcctgattatctgcgatgatatattccctcataatgatcaattaaaaaaactccgctacaaatgtacgcattttgtgcgatttgtagcggagttattcttatattcttctgttcggattaccaggcacgtcctttgaagatgtttgactgatccagtgggacgatgttaccgttcaatgtcaggttgttgttattgaagttcgggctgatagataccgaagcattgttgttaccgctgctcatattaataaatacctgagctgagataccgatgccctgtacactgaatgaacagtttacatttcctttcttatcgatattcatcttcatgtccgaagagttaccgtctacagtcacaccaccgataccgttagggccgggataaggagtgttgaaagctgtctgtacagtggctctgtttccgttcatcaggacgaagttagtgttggaagtcacgaaggaactcataccgttacggaagatcacctgattggcttccagaacaaactgtttgttcttcaaagcctgtacagcctgttggtaggctgccatgtcctgtacctgttcttctgcgcgaagttttgctctttctgcgtctctttctgcttttctgtctgcgcggcggatggctgcgttactttcctgtgcatacatcattgtgctcgcacttactaaaactaatgctaataatgcaataaactttttcataacttttttttgtttaggtttaatacgttgttcgtttattgcaaaaacaaagtgtatgccagattgttcacgggcgttttacaattttatatccgatagctgcgacagcgatactcattaaaggactgataatgttgaaaaagcaataggggagatacaccagcgtaggcacactcagaatggtagcctgcgtcattccgcaggtattccatgggatcagtacggatgtaacggttactgaatcctcggtggtccggctgagcaggcagctttcgtaaccttttttagcataaatgtcgcgaaacatattcccggtcaggatgatgctgatgtactggtcggcagttgccagattgaggaaaagccccgaacagacagtagccgatacgacgctgaccgttttcttcatgaagcgtacgaagagcgatgtgatgcttcccagcataccgctggctgtcattgctccgccgaaacacatggcacataatatcagccagatggtattcatcattcccgacataccacgggtggcaattaaatctgtcaaaacagcattgtcggtctgcaggcttgtcttgccgtagatggtcatcatcagtcctttaaatagggagtcgaagttggaaacggcagcccccgaaatttcccgcaacaaatccggttggaagatcagagcgaaaatgcccgccaatagagtggacagaaacagagtaatgatggaaggcactttccgtgcaatcaatatgcctgttgctatcggtataatcagcagccacggggtgatatggaacttttcgttcagggcagctgccacttccgcgatgtgctgggtattgctggcgtcatgagacagacctgctaccgtaaatataatcagtgtgatgatcagtgagggcaccgtagtaatcatcatgtagcggatatgacggaagaggggcgtgtccgtgacggatgccgccaatatggtcgtctcggacaagggagaaaccttatcgccgaaataggcaccggagatgatagctcccgcaatccagccttcttcaaatccctgtgcctttccgatgcccatgagggcaataccgatagtggcgatcgttgtccacgaacttccggtcataacggagatcaatacgcaaataatacaggtggatgtcaggaagaaactgggatggataatctgcatcccgtaataaatcaaagtgggcactactccgctaatcatccagataccgcttaatgcgccgataatcagtaagatgatgatggctgttgtcactcctgccacgttgttcgtgattgccagttcgtagtctttccaagggattttgtagaaagccatgccgataaggatacaaatggcggtggtagtaagcagcgatacctgacttccgccattgagggcatcactgccaaatacacgaatggtggcgaatagtaatatcactaatacgacaatgggcaatagtgatacgaggggagatggagctttcttcattctaaatataacgctttattatttaatctggtggtttaggtttctttattatgtaactgccggaccttcaatgatgtcggatgctttattgatttcaggcatcgattccggtaaatgtctttagagcgtatcctatcaggaaactgatacctgccacactgaaactgagtacagccatttccgtaaaccgctttcggaagctttctccacgggctacggaataatagtagttgaaaagagcaatgatgataagtgccatggtcagcatcactcccaaagctacgattacattgctgatcagtataaacggagtaaccagtgacactaccgtgatcagataggcgattcctgtatatacagctgcttttaccggatgtttcttatcatccccttccgatttggtagaaagatattcggaagatgccattgacagtgcagcggctatccctgtgatactgccggtcagtgctatcagtttactgtcactcaaggcaagtgtgaaacctgccagtgcacctgtaaactcaaccagcgcatcattaagtcccagtacgaccgatcccatatattccagccgttcttcattgataagtgaaatcaacttttgctcgtgcacttcttcttcatgtgccagccgttgtaggtccggtatatgggcatatttatcataattattatgggcattttcctcactggactccattaatttgatggcgaatgtgatacctagtatgcgtgccagaaagtagaaacgggcgatacgcttatagtccggaccgatttcttttcctgtatatttcttgaggatagcgtaatgcgacttttcttctgctgctatcagtcggagcgttttgcggttattctcgtctttttcgatagatgcgagccgttcatataagatgctttctgttatctcgtttcgttgaaagcgggtgaattcggcaatatcctgttgggttggaatcatttctttatttttttggtcgcgcaaagatacaataaaaagacagaattctttttgccttgccggacagcacaataaaatttattataagtttatattttattggaatatagatgctttcctgttacaccggattcgtcttgcgcctcagccaccagtaacggatgaagagtacgccggtcaggatcagtgcgatggacagtcctgtgtagaagacagatataaaactttcgggcaacaggtggaagctgcggatggtgatgcccatacagatcataaagatcatgacgatccagcttttgacatcgaagaaggagaaagggcagttcttctgttcctttttccgttcgatcctttgagtatgcttgtaatagagtcttttgaagattaatacgaagaacagcagaaagacgatggttgcttctcctatcttgaacatccagccttcggagttattaagccatgtaacgatgcctattcgcaagatattggcaccggcgataatccagacggtgcctgctgtgataagtaagatttctttgttaactccgtatttcatgtttccctttttttgtattaaacggtttactgctccgttttgttgactcacttcttcgacaaagttgtaattagtaaagaaatgcaggtcagtgtagctccaattccaataacaccatgccatccgtacaattgccagaatgtacctgcaaggaaggttcccagggaaccgccgacgaagtaggtcgtcatgaaaattgtattgatgcggttggaggctcggggtgacagttcgaagatactggtctgattactgagctggatgcactgcatacctatgtcgatgatgataattcccagaatgataccaaggtaggtgttttctccgacgaagaagagtagccatgaaaagaggatcagtccgcaaccgatgaagttgaagcggcggacacccactctctttacgtatttccccacaaaggaggcggttaatgctcccgccacaccgcataatcccagcaaaccgatgatgtcgctgttggcatgaaagggggcttgccccatcttgaaggcaaggcaggaccacatggcaagaagggaaccgaagtttaacgccgcacgaatggaataaatgcgtagctgcggaaactctttcaccaaagccaggagggatttcatcaggtcgccgtactttccccggaagttggtctgaatatcgggaaggactttgagcacgacaatcgcgcagacgaacatcatggctgcggcgatgtaatacatttcgcgccatccgaacagttcgccgacgaatccgctgaccacccgtgaagcaaggattccggtcagcaagcccgataggacgatcccgacattcctgcctttgttttccggacgggagaactgggcggctatgggaatgaatatctgcggaatcatggagcaggctccggtgaagaacgaagcaaggagtatcagatggatattatctgccaaagcaatcgtcagcagggagaatatcaggacaaagaaattgacaaggataatctttttccgctgatacaaatcacctaagggagtgataaacaagagtcccgctgcatagcctatctgtgtgaccatggcaatcaggttggtacggaattctgatatgccaagttcatggcgtatcatatttagcagcggttggatataatagatgttggctaccgagactcctgccacaatggcgagcgtccacaggatggatgccggcagacctccgttttctttcaatgactgtttcatgccgcaaagataatgaatatcactcaacaaagaaagtggtggagatggtatttccttcaccgtctactgccgtcagcgaatgtttgccggcggcgggttgcagggagattttgtgaaagtcctgtgtctgcgcttggtaggtctcgtcaagatgccagaaaacggtagcgttaggattgttgtgcgccagttctacagtcaggaaacctttgctgccatccagttgcttgggcagtttgatgcgtgcgttcatcggaggatatataaattgcatcggctggaaagtatcttctccgcatccggctttaaaaggaggcagcggtttatactccggatgatgttgcttgtaataccattcccatacgggtggcagtgtgaaccagctttttcgaagcgtaggctccgtgttggcgcaattttcataaatacgctggctttcatcggctgataaagtgacgagatggtgataggggcatgcctctgtccgcagtcctgccggtaaaacaagaagtgtgtccgtttcatcacagaaccgtcctttcagatgtcccgatttccggcagacctctgcttcgacaaagatgcccgcaggacgtgtaaaccacgaagaggaggggagcagattaaaaatatcgaatagtacggggccggctgtctgtgcacccaccagtccgggctttccttctccggtggcatttcctacccatacgccgactgcatagcgaggcgtaacacccaccgcccaagcatcccggaatccgtagcttgttccggttttccatgcaatggtctgcatggaaggaatggatttccagtcaatctcttcgggacggttgacttctttcaaggcatcgaatgtctgccatacggcgcctggctgaaaaggatcggttgattctgtgattcggcttgtcgggagcaacaggctgcaagacctttgcggcagttgcaacaaactgcgtcccatcattgcatatgcgtttgttacatcccataaagtggcttctgctcctcccagaataagtgataaaccatagtgggaagaagaacggttgatggtttttagcccgatctgttgcaggaaactatgaaacttcgggactccgtatctttgcagcatcgtgaccgcgggaatatttaatgaacgcgcgagagcttccgaagcgggaacagctccttcgaactgcatactgaaattctgtggcgtaaatccgttgatattgacaggtacgtccggcagcaacatatccggcagtaaacttccttcctgtaacattgcgtaatataagaaaggtttgagaatactgcccgtacttctcggagcctgaatgacgtccacttgatttcctccttgtttccggtcgaaatggacgttgccgcagtatgccaccacttgattgctcggaatgtcaatcaccagaatggccagattgcgaatatcacttcgcccgaattcgttactccatcgttccgccaggtcctctacctgagtctgaatgcccttgttgatggtcgaacgggagtattcgccgtttcgttcctgatagaaccggctgaccaggtacggtgcgatttgtgggagcgcatgaggctcatcgggaagtggctcgctgatagccagttcgtaggtagacgaatcgatggttttcttttcgagaagctgtttcagcaggcggtttcgtttgtcaagcaacgttttccgtcctttggacagatgaatcatggcgggcgcgttgggaagaacggcaagcatggcagactccgcccacgataagtcatcggcagaatgtccgaagtagcgccatgcggcggcatccagtcccactacatttcccccgaaaggggcatgggagatatacatggaaagaatctcctctttggaagcgcgaaattccaggcgggtggcccagatcatttcaatcagtttctcacggaaggtgcgcgattcgtttcgtgccaggcggatggtctgcatggtcagcgtgctgcctccgcttacgatgcgtttattcttcacattctgatagaaagctcttccgatagcgaacggattgactccccaatggtggtagaaatgtttgtcttcgaaagtgatgaggcattccttgatcttttccggagtcgtgtttcggggagggaatctccattgaccgtcggaggcgatgcgtgcacccagcagttcctcgttccggtccgtcactactgtggagtaggggacatgaaacaggtggcggggaagacaaaagatatatcctgtcaccaaaaaagcaagaatacaaagtattacttttttggtgacggacaatcgtttgaagaaattcaagattttacttcccatgcaattatgctatctgtcaatgctgtcttattgttcagagtcttgtcagcggctgacagtcgttcttcccgctttggtgcgtgcctgtaccgctgcgtcgtacatagcttcgcactgaatggccggaagaatgaagttacctgcataagttgcctgcaaccttacggtaaatgttttcgattcaccccgtcgcagatcgaaataagtcaatacccggtcgtcacgaatatctttataggtgtacttatcggctgaactttccggagtattcgcttcattagaattggaagaggacgcttccggaacaatcatccgttcattatatatttcccatccggacggtataatatgggtcagtgccagattgctgtaatcggaagtaccgctgatattggatagggtgaccgcagacataaagtccgttccctgtctgatgtcttccacggaaatcggtgaacctgccatatctgtgtatttcacatccagccggatattatcggcaatggctggcagcgtatcattcagcaattgggtacgtgtaatcaggtctacgctcaatgctcctttgccttgattcttcacagagactgttcccgatttcggagaagtagctatctccttctcaaatacggctttagcagatttcacggcgggctgttgcttgccgttccagctccatgtgaaatccagtgtaccggataattgctccgcaagtcgtcccattgccatcagggcaaaggcggtagactgcgtgctgaaccagttttcctgtgccagattctgtgataccttctttgcctgttgcaacgcatcccgatcccgtttcatcagaatgagcgtttccagaatcattgcttcatcccggtcggacgaaccgtaaatcagattcatggaagagtaaggaatgacggtcgtttctgcgttgtatactaattctccggcaggtttcatcttaccggtcagcgcgtaggcggctgccagtctccatttggcttggatggagagtcccggctgttccttcatgcggttcatggctccgtattccggtgcaccggccagtgcaaggctatagaggcggaaggcctgctgcaattccgattgccatatctgccagttgcttgcttcctgcggcatacgccagttttgggcggcggcacgctggaagcgtttccatttgttcagtacgttcggatgaacggcataccctttttcttgtgccagtgtcaggaacatacccgtgtaagaagtgatccattcatcggcgacggcgttgcccggccagtatacaaatccgccgttgggaagctggcgggcatatatctgccggatagcttcctgtacattcgtctttattttctcggcctcctgttcgtccactgccttgaactgggagacgaataagagaggtaatgctttggaagtcagttgctctgtgcaatgatgctgatagttgtataagaagtcgaatctacggctgatgtctaccgacggaatgcgggagacttccagttgcacctgattgttagtcgaagaagaacctgccagtgtgtatgacagttcggcttcctgaccggcttctatccattggctgttgcgtaaggtaaccaccggattcggattccggacttctatttcgatcgtttctttggtctgctgtccgttgccgcttgccgtcaggtggatggttgcctttccggttttgctgcctgttttcagagtgaagtatgccagttggtcacccggctggtcaaaagtgagtgactgctggcgattgcccgtgatctgtacgcctgcgccggatgcttccagcgatacggtcacgttcttcacttggttctccatagcgaatacatttaccggaacggtaatttcttcctgcgtactcaatacacggggcagagtagacaacagcatgagcggtgtccgcacaaatgcagtcttttccgcatttccgtaagcgccgtcctgtccggcaactaccatcgcacgtacagaacccacatacatcggaagcttcaacgtatgtgtctgttgcttaccttttgcgagatagaaaggaccgatgaatttgaccaccggtttgaaacggttggctttggcatctgccggtttcagcgaggcatctccacccgtgctgaacaatgagctgtaacgtccgccggaagcacccagcacatcgtcgtacatatcccatgtacggatgccaagagcctcgcgtgcataaaactcgttccacgggtcgggcgtcttgaagttagtcagatcgagcagaccgtcatccacaatcgccagtgtataagtcatcggttttccgcttttctcgctgacagtcacgttaaagtcagtttccggacgcagcacttccggcatcttgatctgcggttgcagaatcgtctgacggttggtcacaaataccggagcaatgccgtacatacggatcggcagatcattgactgtctgcgcatgaggctgcaacaggctgatatgcagataaacattcggagtcatttccggtgtaatcttgaaggtgagtttcgtatctccctgatcggacacttcgagccattgctgctgcaagacggtcgaaccgttttcgagggataccagtgcacgtcctccggcggctgcgggaatgattgccgtggctgtttctcctatctcataagaatctttgtccagtgagaaagcgagcatcttgatgccgctcgggtctgtcttgttcgaacgtccgcgccagtcgggccagtcgatgtagacggttcctccggtagcgtgtccgctttcacggtctttcacgtacaccagatagcgtccccaatccggataattgatgcggaacttgaaggaggcttttcctcctgtggtctgcaggttaccactggcaacgggagtgatggaactgttgttgatgtaggttccgaaagactcttcaccgttttcccaccaccagctccagctgatccggtagattttatattccagattggaacggttcaccggctgtccctgatcgttgaccgtcacgatatcaaacacatgatctttgtctgtttcgatatactttcctttcggctggttcagattgatgcccacatacgatgtgaacggagagaagggaacagtctgcgagtagatgcttgcatctcctcccggttcgaagacacgagtggtgaacgttgcattcagcatacccggagcccccgttgctaccggaagctgtatgttgacgcctgctcttccttccgcatccagtaccccgttgaacacatccgcccggacggtcgtaaagtccgttgccggattgttgaacaggtattgtccgtagttcttgaactgcgtattgactttcgataaggacatttcgacctttgctttcagtcgcgatgcggtggctcccgtcagccatgaagaagtaagcggggcatatacgtctttgctcgaagcctgaaggatggttggcaaagccagcgtaatcttcagacggttcggcttgatggtttcgatgcgcagccccttgtggaaggcagttcctcctactttcacgtaggcattccataatccggtgggatcgtcggcttgtgtgggcacggcaaatgtataaaatccgtttgtaccctgcgtagagatcattttggtatagaactgtcctcttggattgtaaatctccaatgctaccggatgtttgtccggaatgcgtttctcccggtcttccagcatgaaggaaatatgcagtgtatctcccggacgccatacgcctctctcgccatagacaaatcctttcagacctttctgaatgtcttttcctcccacatcgaaccggctgaccgactgctcttcgccatcgaccacgcgtacatatgccttttgcttgtccgcttcggctaccgctatgaaaggaactcccttcggagtgatttctaccagcccttcaccgttcgtctctccctttccaatcggctggagctggaagttgtaaatcgttacctgtgctttcgctaccggctttgtatccagaatgttatttaccgcaatccacaacttattcagtgaattacgtttcacaatcattcccagattggaggcaaagatattgcaggcagctatccggtcggaattcatatagtaggacggatggcagggattatcccgttctgtccatcggtactggctccagtccatcggcacgctgccgttataataatagtatgtttccggagtgtcccataccgcttcatcgtcttccgacaatgtctctccgctgactttggtcaggttgtcggaagacttgttgtcggcaaactgcatttccttgttttcacttcccccgcaaggataagcggagtattcttggcggaacgagaggatgacacggtaaatggctcccggctcctgatgaatcaatccggcaaggtctatcgaatagtcttcccaacggtgcacatctttggaagaatctttcgccagccacaatgtctttttataaaccagtcgtcccgaacggcgcaattcattagctgaggagagcgaattgttctgcatgaacatcaatacgttgttttcgaaaatacggatcacgctcaaatccaccgcatatagattgacggcacggaaggggatgatcagacttttcgaatcgggcaggatagcagcggaagtagccatttctacctgcggtttcaggttcagttcgctgaatgagatggaatgggaagtgcccagcggtttgtcctggctgtttcttattccttcatggatattcagtgtcagtttattctgtttgccggcttcgaagtaaacgaatactttattctctttgatctggaaaatagaggaagaaacttccggcacgtcgatgagtcctttcaagtcctgtgtgttggatacagggtcggagaatatgatttcaattccgttttccggttggtcgatgcgtacggcggacaggaagcggaaactgttctttgccgggatcagaatactttcgttttgggtacggtcgatgcctgccggattgcctttggcggtaatttccagttggtaatcttccgcctcccttgttatctgactgatgctgaatgcgtatcgggtcgggtgatctgtctgggtgatttcaatcggatagcttttgttcttttcgcttccggctgtgagcattttctctacttcctcttttttcactacatcgctgaaacgtatttcacccgttacggtcacttggtcgggctgggtggctgtgacggttatcggatcggtatgaatactaaagtttcgttcctgcacgcggaaggagaagttgaattcttccagctttttgtctacatcgacgaaatctcccaggtggaaggttccttcgtaaaaggcacctggtttcagtgccccttcttcggggacaaattcaatggtattgttgctgacccaatacgtttttcctttcaatgaaggagagaaactgaacggattgtctttcagttcctgattcaggtctaccatcggctggtcctgtgtcagttctatgcgtatcgttgagttttgcgaaatcactcctcccgtataagcattgacgtatggagcgtattcggcagaaggaataatgtctttctgattacttttacaggacgaaaatcccgcaattactgtcaaaagaatcaagaatagtccggcagcagtgctgcatctggttttaatttgtcccatagcgatgaggttttatgattcaacaaacaaatatacagtttttatggaagaattctcttaaatctgcttacttttgtacattcaaatcatgtatttatgggaagaaagcaagaatataaagagacgaatttggagttcttaaaagaattgtcatcgcaggaaggtgtttatgccttgccttgcggcatctattataaggttttggagaccggtacggggactgtttttcctaatgtgcggagtattgttaccgttcattataaggggagtctgattaacggtcgggtgttcgataattcttatgaacgtaattgtccggaagctttccgcctctgcgatgtaatagatggttggcaactggcgctccaacggatgcgtgcgggagataaatggatcatctatataccttacacgatgggatatggaacccgtgcatccggtccgattccggctttttcgacattggtatttgaggtagagcttttgggagttgcataactaacgaagaaagatatgaaagtggaaataagaagcaaagtggtgatattgctatgtatcgttctggcagttttttcttcctgtatcacggacgatgatgatgataggggagactttgctcttgttgccggtgacgcccttcctcagttttcggtagagatgagtgatgggggagtgttgaatacgcagtcatttagcgggaaggttggagtgattgtcttttttcatacggattgtccggattgtcagaaagaacttccggttattcagaaagtttatgatacgtataaagagaatccggatgtattattgtcttgtatcagccgttcggaatcgggctctgaagtacaagcctattgggaaaaacattcgtttaccttgcctttttccgctcagaatgatgatgctgtcttttcgctttttgcttcccataccattccccgtatattgataacagacaaggaggggattattcgtgctgtatatacagatgatcctttggcgacctatcaagaattggcaaaagatatcgatgctgtcttaatcgataagttgtccgggaatgaacgatagctcatttgttgcaaatcaacaggtggtttaatctggctttttctattatttgttttcattcttatagactggtaaaaaaaaattatttgtattatatatttacgatattccccgggggattaacaatttttatgtcagtaaatgcagggtggaacggcagaagactggaaaaataaaaaagatgatctgttaattgattatcaggactttaattgttgtgctatccctacagaaaagcaaatctactgacactactgacaactgacaccttaaggcctctttacagagaatacatccaagaggaatggatgagtatgtaaattaaaatgcctttaaataactcttaatcactgaagttccgcaaattctttatattattgacaaacagtagtatctcaattgggagtgactaaaaagtcggtagtatcttaagtctcctcccaggagggaggggaattaagatagtttggataacgcaaaagtaacttgcgaaacttgaattaatcatagtttactaataactttgtcatcactggaagaaagaagcctattcaacgctgttgaaattgtattcctaccttcgtccggttattcatatttgttgtagtgtatatatttacaaatgaatgaatggaaaagtactgccactaaatgttccatactgacagagtgtgcatgaaattaatattttagatgtttataatgtgttgataattagtaatgtatgcaaacggaaaaagaaatgttattactaaagaaacgctaaagtggcagttgtcagtgtcagtagggaataaaggactttttaatggtgcaaatagtatacatatgtgagtgcgaaagaacagaaatacaaagagaaaagaacgaaaagtgaaaggaaatgaggcagaggagtgtaacgattgaagtacttgaagagggaaaatgatgtacaagaatgtaagaagtaaagtactggagttgagagtttgaagtacttgagttggaagtatgaagtacgagaaactgcaagatgaagtacaagagttgatgggagtaagtactagaatcaatggaatgaaaaatagcagacatgccatttcttagtataacacactatcaaagtcttgaaaaaagcgtttcaatacaatcattaatacactgatttaagttatctttgcggttaagaatagatgattgtcattatgaaaagatcaataaagcgtttgcccaaacgcacacaggaagagttggcagtgctgcaagaactgatattgcagtaccttgtgaatgtacgtatgattatcctctatgggagttatgcacgtggagaatatgtcatttgggatgaaacatacgacgaacgaggtggacttacttactaccaaagtgaccttgatattctggtgatatgtgatacgggcgatgctgttaaagcagagaatcatgcgaacgcctttgtcgttcctaagtatgataaacgaatggaagggaagcggcacccggcaccaccgcaaatcattgttgaaagcacgacgaccgttaatcgggctataagaagaaaacattattttttttatgagatcataaaagatggcattctattatatgacgacggcacgtttcagattggcaaacctgagaagttgccgtatcgggaaattaagcaatatgcggaggaagaatatgcaggatgcttcgacatggcagaaagttttttaagatctggacagactgccaacaaaagcaatgatttaaaatacggttcgttcgaattgcatcaagcttgcgaacgttactacaaagcctatatgcttgtctatggcggcactcgccctaaatcccataaattggaagtgttgggcccgatggctaaaagccgttcacgaggtttcgcgaatgtatttccagttaatactcccgaagatagagaagcgtttgataaattatgtcgggcgtatatcgaagctcggtacaaccgactattcactgtcagtgaagaacaatacgaatacatgctggcacgaacggaagcattgcgcgaggtgactattcgggagtgtgccgcacgcattgcgtattatgataagatgatagagaaggaagagaattctctgatttgaagctttggaattttagggtgacgcacgatgaaagtcaccctactcaatatactattaccgtttcttccgaatcttaaatgtagcaagattacctttatggtcgctgggccaaatacaagaaggcgtcagaatcttatctttagaatcattttctgttatttttccccggacaactgtttcggagggacctaccaacttgctattcttcatggaaagcatcgactccaatggataataataaatgaaatcaatccggtcacgttcgtctgcctcaggcgcccaagccaacttttccagtttagcctcttctgcgagtttgtttccggctgggaatgtaaaaccgggatatcgaactgtattgggatatttttcgcgatatgtatctttgaatcctgctttgctcaacatcattgagcagtcccaatgaatgacagccccattatgatcccacaaatcctttgtatctgcctgccagtctaaatgagagggctcattaaaatctcctcccatgattatcgggcggccttgttgaatgtcagattgtacttcctgaataaaagcacggatggtttcatcccggaaagactgtctgtttgctttcaagacttcttcttcatccgttatcggcttatccattttcttccaggtagtaccattatatccacgtggcatatagcattgataatgccggtagtccaaatgacaagaatagaaagatacgggttggccttcgattgttgcaaccattttcaccatagcacgaccttcgtcaccaggtacgatgcagcatttggtccaactgtccggcttgaatttactcaaaacaccgattgcaagatcaaacgtttcaccatagtaatgttttcctctcttctccagctcttcgatcacatgagggataaactgttttccgtctctgatttcgcacagaaaaacgacatccgcatccatctgatccagtacatcaataatgccttgatctccgttgggtactttagtacatccatgccacaggtttaattggaaaacggtaaaagtgtctttcgcttttgcatggcaaacattgaccagacaaaacaagcaaagtaataatagtaagttctttttcatatcgtgtcctttatattctttggaatttcagtcattgtgaaattcattgatatattccataccataggtcattaagaattcatgcaaaagtaatacattttttatttattccaatctatttatgtgctttttgaattttcttcttcggctagttcttttatttctttattcagaaagactgataatacagttcttactataactacacctcctaaaatagccagttcgtctaaagtcgggtctactacggtctttagtatgtctgatgcaattagaaattctaatcccaataagaggtaactgccgaaatcagctctcagctgccggacattattgatggtataggttccgttgatccgtttgaattcgttacggagaaaagcgatgaatcctacgaatactccataggttacaatcaataaactgattacgccaatgatggtggccagtatgtttaaaaatgtcagtagcatcgtttcatgatgtttggttatattgtaataacaagttatcctgtataaaagttttgtattgtgatgtagaaaacggataattagttgtaatagtcaagacttgttctgacatttgactactatggaggaacagtcgatgaaatacttgctgccccgttttagctgattatgttatttcattatacatattggcaaattcaatctgccttgtacgcctctggtatctattctgctttctttgggacctggaatcagtgggctatagtttaagatatggcgtattctttttcgttgttctaaagttatttcattataaaagcaatatgcatagtccataatgttgtgtgcttcatattctcctttttcacagctatatcgtttagctaaatcttttaattgatatttattctgcttatccaaattgttaagccattgttcatactcactacggttataactgggagtatctttgcaataatcagtatcggtacacattgaagtggtccctccttctgagaatacatgacgtaatcctaaatagtgtccgagttcgtgtgctaatgttattgcagcatcgttttgattaattctttcatctgtactttgctcataaatatatgaactattgatcgatatacaatatgggaaactcaaattctctaaagtgatccacgaagctgatacctgttgagtcccttctaaaaaaaagttctttaaactatatggaaatgtagatatgcctaaaatctgcgaatccgtaaaaggatataccattatgttaatgtattcattgggttcccatagtaaagatgtatattttcctgtattatctctcataaacttttcgcaatcaataggaagctcattaaatggcactctttctactccaggttctggtaatgtggttccattcttatctttggttgctaatacaaattcgagatttatatcaattccacacttttcagattgatagaaatggttagctcgcactaatacatcttttaaatggtcttcttttatatattgatttatgtcattttcgttttgataaagaacatggaaaataacgggtaattgatagtgtattttatctaaatctggattaacttctcctttttgttgtgaaatcttgattgtttggtttatcccttgggcggatatgattagattagtttgtctgtttgcatgtttggtgttagctagaatttttatagtaagtatatcgtttccttctccttgatatttgtctggtatgcaccaatcagctgaatttgcgatgatccattcagaattagatgtgatagcaacagttattttccctccgttattgtcgatgttgcggaagatgttttgtgaaatttcaagttttatatcatcgattttctccgaatgatcacagcttgtggctagaaatagtaatgtaaagagaatagtgttatatacaattttcatagcttttatttataaaagccgtaatttctcattttcaagaaaagggaaattacggctttgggatatttgtaacctttactgaatttctacttttactgtaaagattggtgggctttaatcacgagttccggtaaaagtggtcatacttcctgcattattaaggaaacttatagtcattgctttacctgtaacagttatgttgataccagatgagctttcgcttgaaagaatgtattgattgccttctttagtaacattgtaattttcactaccgttatctgtgtagaagtcagcggtaacttttactacagaagaagatactttggtaacagtgactacatatgcatcagctgtaacattagttccaactttgagtttacctgtataaactcctgctatgctggcactgaaatcaccagacgtttcatcatcatcatctccacatgatacaaatgacaggcttgatataagcacaatcatcaacatacttaaaattctaaattgtttcatcttttttgtttttaatgtgtaatctttttagtcatatactttggttgtcttaaaaaactttgcaaagatacatgctctttaaacataaatatccttttaattgttgctgttttatatacaaggttgtagaagatatttctatgttctgttgttatatatatcagaatatatttggaagaaattgtattctaatataatggatatacgtaacaacagttctgtatctaagctctgtcttctaaatatattatatacattagttcgatcgcaatagagtcgtcttgcgaaccatgtgaccgagcgttcttggcgatggagctctttttcaataatttgtccgatgtgtgtcatactggattattttcgagagtttattttatgtaattctttattttctaaaattctctctttatatcctcttctctttttaataatttatggatattattatctcattgcaaagatatgttataagctggttcatggtaagaatttgttgtagagaactaaacaacgatagtgtagattatttgtaacaatcatcatcttttttataaaaataggagagtgccttataaaaaatactctcctgtataataataagtaacttttattacttagctaaggcctgagctacgtctacagcgcaagccacagtgcaacttaccattgggggttaccaattcccaagaatcctatcatttcggcttcttgtaaactatagcaatctgttattaatcaatactataatagttattcataaatgatttgagttggcaaaagatattaactcttcgatttgccctctctcatagctttctgctggttcaagcgttcctgctgcttcttttgattatgattttatgtaaatgtagctttcattgtatataaatctatcattcaacaattctaaatgataggtgagataaggtatctaaaactaccatctacttcaaattaccacaaataaaaaactcctgtaatcacatggactacaggagtttatttatataatgtaacttgaattacttagccaaagcctgagctacgtcaacagcacaagctacagtacaacctaccataggattgttaccaattcctaggaatcccatcatttctacgtgagcaggaactgatgaagaaccagcgaactgtgcatcagagtgcatacgacccatcgtatctgtcataccataagaagccggaccagctgccatgttatcggggtgaagagtacggcctgtaccaccaccggaagcaactgagaagtatggcttaccagccaatacacgttctttcttataagtaccggcaaccgggtgttggaaacgagtcgggttagtagagttacctgtgatagatacgtctacgccttctttccacatgatagctacaccttcgcgaacatcgtcagcaccgtagcattttacttttgcacgaggaccgtcagagtaagcgatttcgcgaactactttcagctcaccagtgaaataatcaaactgagtctgaacataagtaaaaccattgatacgagagatgatctgagcagcgtcttttccaagaccgttcaggatgcaacgcaatggctctttacgtactttgtctgcttttgcagcgattttgatagcaccttcagcagcagcgaaagattcgtgacctgcaaggaatgcgaaacatttagtttcttcgcgaagcaacatagcagccaggttaccatgaccgataccaaccttacggtcgtcagctacagaacccgggatacagaatgcctgcaaaccgataccgatagcttcagcagcttcagcagcgtttgtgcagttcttcttaagagcaattgcagtacctaccacataagcccattttgcgttttcaaaacagataggctgagtttcttcacacgttttataaggatcaagtccggcagcttcgcagattgcgttagcttcttcgatgtctttgatgccgttagcgttcaaggcttcaatgatacctttgatacgacggtcttggctttcgaattttacttctctaatcatagtttctttcctccttatattattcgtgacgtggatcaatgtgtttaactgctccctgttctgctgttacacgaccataagtacctgtaactttcttcaatgcttcgttagcatcagttcccttcttgatttcatccatgaatttacccatgtgaacgaattcgtatccacagatttcatcattcttatccaagaagatatttttgatgtaaccttcagccatttcaaggtaacgaggacctttagccagagtaccataaagggtacctacctggctgcgcagacctttacctaagtcttccagacctgcaccgataatcaaaccaccttcagagaaagcagactgagtgcgtccgtaaacgatttgcaggaagagttcgcgcatagctgtgttgattgcgtcgcaaacaaggtcagtgttcagtgcttcgaggattgttttacccggaaggatttcagcagccatagcagctgagtgagtcataccggaacatccgatagtctcaactaaagcttcctggataacgccttctttaacattcagtgtcagtttacaagcaccctgctgaggagcacaccaaccgataccgtgtgtcaaacctgaaatatcaacgatttctttagattttacccatttgccttcttcgggtatgggagccggtccgtggttaggacccttctttacaacacacatgtgttccacttcgtgtgaataagtcataattagctcttttttttagtgatataattaaaaatacgtagtcacgattctctaaatcgcccacaaaggtagtcgatttatttgtttctgcaaatcgccatatcttacttttttgtgaaaagtgacaaatccgtttacgttttttcttcgtttgctaagtcgggattgcatttgtgaaagattactatgcgtcgaactatctattcgttgctttgttgttatctgaaatataaattttatggaactgaatcaggtagatatacattatttgatagcggcaatctgcgttatttcatctgcattggtattttatactatcggtgtatggggagaaaggctgcaaaagaaactgaagttatggcatattattttctttcttttaggattggtgtccgatgcagtcggaaccagcctgatggagcatattgccaaattaacgcatttgcatgatgaaatccacacggtaacggggacgattgctattcttctgatgtttgtacatgcttcatgggcgatatggacttatgtgaagggatctgccgaggcgaaaaggcattttaatcgttttagtatcgtcgtttggtgcatttggttaataccttatttaataggtatggctataggaatgcatttacatgcataaatagttatatgtttttgcattagatagacttaaaagagttccttctttcagcta

SEQ ID NO: 4596 - DNA, 160032 bp, Unknown
  gut microbiota DNA sequence
ataaatcaatgtccaatgtggattatactttttttatttcttataaatcaacttgctcggcaccccgtttccgaagagttcatcgcccagcgttgtaatcttatcacctgtagcaagcacatagcgcagattatcgcatcccatgaacgctccgaactcgatagccgtcacgctcgcaggcagctcaagtgttccggcaagccgtccgcagttgctgaatacccgttgaccgatggtcttgaggttatgtggcagtttgatcttcaggagatacttcttttgtgcgaaagtgaagtcggggatagtcgtcgcatttgttttagaaatatccagagatacgagattcggcatatagtcgcggattagtttgaagtcggcgttatccagtttcccttcgatggtcaggaagttgatgtccctgggttgcagaccagctttcataatctcgtcttccagtttgcccattgcgcctacctgtatggtggtttccagcggttcaccttctataaatgcaaagtgctcccatctgttcttaaaacggtaggcatcactgctgcccagcgggatgaagatggcggtcacactgtccgccagagcttccggcagcaggttaggagctgtcttcttgcgtatctgacagattttcaagttgtcacatcctttgaaggctgcatcttcgatattctttatcttttcggaaaggatcactttctccagcgtctgtttacctttggtcactccgttcaccacattcgagaaagcgtaggcagggatgaaattggccatatagatgtagaactttccgttaggatatgtgccggcttttccgctgtacatcttgatttcggcattggagatatcaagcactttcaggctgggaaactcgtcgcggagatgtctgaagtcttctgcgttcagttttcctgtcagtgtcaggtgggtgatgctgttggcttcttcttccgtcatcatcgagatcaatgtgccgggcttgctgacataatacgttttgcttacttgtgcggttgctcccaaagtactggcagccaataaaaaacttatcagtagttgtcttattttcataattatgcagatttgttcagacaaatataggaaaaataggtaagacacgatgtttttttatgttttatatctaattttgtagcgtgattaacaaaaagtaaaaatggagacagaagaaatcagagaaaagaaagaaccgaagagacttcccgtatgggcgtgcatcctgttgtttgcactggggcttttcgtcacctttggattgtatagtacgataggcttcggagttttatctctgattcttggtgatgaggcaaggcaccccggattgttggggcatatggtggcggaagccggtatgctgctggctgtgctgacttcggcagtgattctgctctattttgagcgccgccctttctctgacctgggactgacactgaaaggtcatgcacggggattgtggtacggactgctggcagccatccttctctacttgatcggcttcggactgtctttggctttgggtgaggtggaagtaactggctttcaattcgatcctctgaatctgcttgctacctttgtgttctgcctgctggtggctctggccgaagaaatcatgatgcgtggctatatactcggccgtctgctgcatacccggatgaataaattcctgtctctttttgtctccgcactgctgttcgcattgctgcacctcttcaatccgaaccttgccttcctgcctatgctgaatctgttacttgcaggtatgtttatcggcgcttcctatttatatacgcgcaatctttgtttccctatttcccttcatcttttctggaactggattcagggcccgatactgggctatcaggtaagtggaaatgactttgggacatccctgctgacgctgcatctgcccgaagagaacgtactgaatggcggagccttcgggtttgaaggctcgctcatttgtacagtactgatgattatctttacgattttaattgtttggtggggagaaaaacgggaggcgatcagtcttgctgtaccccgatcatgctaagctgaatccgtttccggtcggtatccacgttcatcactctgaccatgacatgctggtggatggacacgatttccgtaggatcggagatgtatcgttcggccagttgggagaggtgtacaagcccgttctccttgatgcctatatcgacgaaagctccgaaattggtaatattgcctacgatgcccggcagaatcatgccttcgcgcaagtctgcgatggtgcgcacgttcttgtcaaattcaaataccttgatcgctttacgcgggtcgcgacccggcttgtcgagttcctgcatgatgtcttgcagggtaggcaggcccacagtcggtgtgatgtagtccgatatcttgattttttggcggagttccttattcgcgatcagttcgtctacgctacatttcaagtcctttgccatttgctctacgatgtggtagctttccggatgcacggctgtgttgtccaacgggttctttgctccgggaatgcggaggaagccggcacactgttcgaaggctttggcacccatgcgggggactttcatcagctccttgcgtgaacagaaagctccgttctcggcacggaagttgacaatgttttgtgccagttgcggccccagaccggatatgtatgtcagcagatgactgctggcggtattcagattcacgcctaccaggttcacgcagttttccactgtctggtcaagggctttcttcagtttcgtctggtctacatcgtgctggtattgtcccacaccgatagatttggggtcgatctttaccagttccgccagagggtccatcagtcggcgaccgatggagactgctccacgtaccgttacgtcataatcgggaaactcgtcacgggcgatcttggatgccgaataaatggaagcgccctgctcgctgaccacgaatacaggaatctgccggtcgaaggtctgatgattgataaagtcttccgtttcgcggctggctgttccgttgccgatggagatggcttcaatttcataggcttctatcatcttgcggagtttggaggccgcttcaccggttttattgaccggaggatgcgggtagatattctcattgtgcagcaagttgccttgcgcatcgaggcagacgactttgcagccggtacggaatccggggtcgatggcgagcacccgtttctgtccgagaggaggagagagaagcagctggcggagattctccgtaaatacgcggatggcttcgtcgtcggctttttctttggactgggcggcaaattctgtttcgatggaaggtttgagcagacgtttgtaggcgtcggcagtggcttcctttacctgatggctgcattcattattgccatgtacgaactggcggtcgaggcgttccagacaggcttcgtcatccggactgatggatactttcagcaacccttcggattctgcccggcggatggcgagcaggcgatgggaagtgcagcgtttcagcgattcggagaagtcgaaataatcccggtacttggcggcctcttcctcttttcctttcactaccttggcggtgatttccgcctgacgggtgaactggttacgtatggcgttgcgggcacgctcgtcctcattcacttgctccgcgatgatgtcacgggcacctttcagtgcgtcttccgtatcctttacgtcgcctttgacgaaggtggcggctttggcggtgaggttaggctccctttgcagcatcatgatcatggccagtggttccagtcccttctgacgggccgcttcggcacgggtcttccgtttgggtttgtaggggaggtagatgtcctccagttccgtaggattccaggtggcgttgatgcgcttttcgagctccggagtgagtttgccttgctcgttgatggtactgaggatggtttccttccgtctggctatgtcgcacaacttgtcatgttgctccttgatgttctctatctgtacttcgttcagtccgccggtagcttccttacggtaacggctgatgaaagggatggtggcaccttcgcccaacaagtggagggtactgctgatttgtctttccggaattcccagtaatccggaaatcatttgatgaaatagttccataaacaatttttttgtgaatgaatgagcgacaaaaatacacataaatctgttatagccgacaagttttagtatatttgcaagctaaaatgagatagtaacacttcaaaacttacaagtatgatgagatatataggatgcctgtttatctgtttactatggcttttccgggccacagcgttatttgctgtctctaacgatcagaaacccatcctgattatctgctcctacaatcccgccgctcatcaaacttcggtcactatctccgactatatggaagaatatagcaaattgggagggaaacgcgatattatcattgaaaacatgaactgcaaaagtttctccgaagccccgctttggagcggtatgatgacgcagattctttctaaatatcaaggggagaagcatccggcgcagattattctgttgggacaggaagcatgggcggcgtatctgtcgcaacgggattcgatacaggtgaaggtgccggtgatgtgtagtctcgtcagcagtaacatcgtcatactgcccgaggatacggttgccggactggacacatggatgccggaatcggtcgatctctttaccgaccacatgaatataccggaattgaagtcgggatttatcaatcagtacaatatagaagataacgtccggatgatcaaggtgttttatccgaagacggaacacatcgcttttatttcggacaatacttacggcggcgtcaccatgcaggcactggtgcggaaggaaatgaagaagtttcccgaaatcgacctgatcttgatggacggccggcggcatactatctatacgattgtagaagaattgcgtcatttaccggagaatacggtgatcatggtaggcacgtggcgtgtggatatgaacgaaggttatttcatgcggaatgctacttatgccatgatggaggttactccgaccattccgacttttactccctcatcggtgagtctggggtattgggcgatcggcggagtgctgcccgattaccggaaactgggaaaggacatggcattggcatctgtacagattgatcaatatccggcggatgaacagcagcacctttccgtgattggcagcaaggccgtactggacagccggaaggtgaaggagtggggactggacccggatatccttccttttgatgtggagattattaatcagactgtatcattctatcagcaatatacttatcagatttggtcggcgtgtgcactgtttctcatccttgtgctgggtttgtgcatctcgctcttctactatttccgcaccaaacgtctgaaggacgatctgctgaagtcggaaaaagacctgcgggtggctaaggaccgtgcagaagaatcgaaccgtctgaaaagtgctttcctcgccaatatgagccatgagatacgtacgcctttaaactccattgtaggtttctcggatgtgctcgctgtgggtggcaatacggaagaagaacagcagacctattatcagattatcaagacaaattcggatttgttgcttcgcctgatcaatgatattcttgatctctcacgcctggaagcgaacagggtcacgttgacttgggaagagtgtgacgtggtgcagctatgcaggcaggtggtggcatctgtcagcgtttcacggcagtccggcaatcagttcctgtttgtcagcgattatgagtcgtttcggatgacgacagacatacagcgtatgcagcaggtgattatcaatctgatgtctaatgcggataagttcaccaggaaagggcagataacactggaattttcggtgaatgaagagacggagatggctgtattctctgtgacggatacagggtgcggcatcccgaaagagaaacagaaactggtatttgagcgcttcgagaagctgaacgaatatgcccagggaacaggtttgggattatctatctgtaaattgattgtgcataaatggaaaggggatatatggatcgactccgaatatacgggaggtgcacggttcatgttctcacatccgcttaaaatagaaaaagaatgaaacgatttgcatgtgtttacgtatggcttctttgcctcgtgctctcaattgcggcacaggaaaaagtagtgaagctgaaaattgtacagacaagtgatgtacatggtaattattatccttataattttattacccgtaaggattggcagggcagtctggcacgaatatacgcttttgtggagaaagaacgcgaacaatataaggagaatcttattttactcgacaacggcgatatattgcaggggcaaccgactgcctattactataattatatagatacagtatcaccccacctatgcgcggaaatgatgaactacatgaaatatgatgccggaaatatgggtaatcatgatgtggagacaggccgagccgtgttcgaccgctggataaatacctgtgactttcccgtattaggagctaatatcatcgatatatcgaccggagaacctcatcttcctccttataaggtcatggaacgtgacggagtgaaaatcgtaatccttggaatgatcacccctgctatccctgcatggctctcggagaacctgtggaagggactgcgtttcgacgacatggaggagactgcacgcaaatggatgaagatcatccgtgaaaaagagaatccggacttgatgatcggcttgttccatgcggggcaggaggctttcaaaatgtccggcaagtataatgaaaacgcttctctgagtgtggcgaagaatgtccccggatttgacattgtactgatgggacacgatcatgcgcgcgaatgtaagaaagtgatgaatgtggcaggtgattcagtactggtcattgatccggcaagcaacggaattgttctgtccaacatcgatgtgaccttgaaactgaaagatgggaaggtgcgcagcaaagatataaaaggagtattgaccgaaacgaaagattatggaatcagcgaggactttatgaagcattttgctcctcaatatgacactgtccgtaactttgtctctaaaaagatcggtacattcaccgagagtatctcaacctgtccttctttcttcggaccgtctgcttttatcgacttgatccataccttgcagcttgatatcaccggtgcggagatatcctttgcagcaccgctttcatttgatgcgaaaataaataaaggtgatgtgtttgtcagcgatatgttcaatctgtataagtatgagaatatgctatatatgatgactttatccggaaaagaaatcaaggactatctggaaatgtcttatttcatgtggaccaaccggatgaagtctccggacgatcatctgctctggtttaaggagaaacgtcgcgaaggtgcggaggacagagcttctttccaaaatttcagcttcaattttgattcagcatcgggaattatttataccgtagacgtcaccaagccgcaaggggagaagattacgattatcagcatggcagacggcagtcctttcctcatggataagatttataaggtggctttgaactcttaccgggggaatggcggtggagaactgctgacgaaaggatcaggcatcccgcaggagaaattgaaagagcgtatcatcttctctacggataaggatcttcgtttctatctgatgaattatatagaaaagaaaggtactatggccccgaaggcattgaaccaatggaaattcgttcctgaaaagtggactgttccggctgctgaacgtgattataagtttttattcggagatagtcaataagtaggcaaaagtgttctttttgacagataatctctcgccttaggttgaacatctcattattactggtatctttgtcgcaaccaaaagagagagtgtatggatatgcaagttgttcctaagataggtatttcttcggtagttcattctaaacatatagatccgggtagtattgatgtggtcggcaatgatatagcgctcttcgacacggagagcgttatttccctttataatggccccagtaaactggaagtggtgagcatcggactttgtctggaaggctctactcgttttaatatcagtctgcgtgagtttgaactgattccgggcagaatggttattgcgttgcccaatcagataatcgaacatcgtcagttcagttccaatttcagagggattttctttgctgtatcaaaaagtctgttggaatcattgcccaaagttggtaatgtgctttcattctttttctttctgaaagattacccttgttttgatctcaatctgcacgagcaggagatgattaaggagtatcatgctttcatcagaaagagattgaaaaataaagacgataggtaccgtagggaggtagtaatgggattgatgcagggcttcttctttgagctttgcaatattttcaacagttatgctccggatgcttctgccgttgtcaaaagtaaaagtcgtaaagaatatatatttgagcgcttctatgaatctttggttcagtcttatcagtcggaacgcagcgtgaagttttatgcggatcagttgtgtctgacgccgaaacatctgtccggagttgtcaaggaagtcagcgggaagacggtaggggagtggattgacgaattagtgatcttggaagcgaaggcactcttgaattcttcgagcatgaacatacaggagatagccgaccgtttaaactttgccaaccagtcgttcttcggtaagtactttaagcattataccggtatgtctcccaaagaataccggaaaagcagatagctccccaaaattacaaaactacagaacacctgaacgtactcggctcaatgtttccggtgtcatcagcaggtatgaagcgatgtgtgccaaaggtgcccgtttgatgatttccggatgagtttcgagcaatagattataacgctcgcgggcggattcgaaacgccaggaatcggctttggtttgcgatacaatcagagaatattccagtatcttccgatagaacatattgatttcccagttttgctttgtcagctgcatcattttgtcataagggaacagatagatgacagcaggctccagtgtctctatgatcaatcgggtagggacttgtttcagcaggctttcgatacacatcaggatacagccttcgtatgagaagtgttcggtaacgtctttcccgtttttataataatattgccggagcatccctttcccgacaaaaactaattcatgggctacttctccttcattaagtgcgatcactcctttaggatattcctcacgtatcaggatgctttctatctgtcggcgtccctctatactcatttcgggaaagcgggaatttacgacggcatttacagtttctcttagtagtgtatccatgtcattatagtcttgttatgtgcaaaagtactaaaaacggttgatataaatcaagttgattcaaaaaagatgtatctttgtctccaaaataaggatgtaatatgataatgaataagataataggaatagcagctttactgctttgtctgacaggttgtgtcagagataatgatgcaatatattaccctgtaggcgatgtggatattgaaagaggaggtccggcgttggaagtcggagagggggatgtattggtagcgcggagttttaatgaagaagattatgtgctggatacgatagctcaatatccgaatgacccgactttgggtaaactgacatttatgattgacttgaaaaatcaacagaaagatctgaatgtggcggatttcaacggcgtgggtaaatcaaaactgaccatgagccttggctataaggatggtaattatccatcagagagtcaggtccccatttatacttctcaggacgtcacggctaaatatgcagtcaaacttcgtctgaaaggagaattgcttgtatccggtgatgaatggatgatcgattatgtgtatgcgcagctggccagcttgtttcagccttatccgcctgcgaatttccccgaagtctttatgtgtaagggaggtatgaagctgggaactttcgattcattccgaagaacatgtacattcgatatcacttatgatcgttccgacctctcttttagtcaattatacttcaatttatttatcaacctggccggtcagaagcgggaaaacagagtccgactgcggattgataaagagtcttactttgaattgtacgagcagagtgaagaaatgtaagtaagcagcgtttttcttcatttgttggcgggtatccatgtgaaacacaatcgttttacatggatataacattcttttacagaaaaaactttgaatgctcaaataattattaaatcttttaacatcttaatacaatatcaataagcatatccttctttttttaattatgcttattttacctcttctactttatattcatccttcactttcctgcatttaaagacgcagtaatccggattatttaaagcgttatcaaggctttgtggcaaaacgatctctttcgtctgtttgttgattgctatcaatgcgtaataaataccttcttctttgcattgttcaatcaatacctttttcaattcttttacgttatattccatttcttgagatatgaacataataaaaaaagcctcttacttcaatgtaagaggctaactaaaatagagtagtgggtacgagaatcgaactcgtattacatgcgtgagaggcatgtgtcctaaccgttagacgaacccaccggcttttgatagatttaaaaagagccaagtctataaaacttagctctttttatttagagaatcttgcggaagctgggggattcgaacccccggtacggttacccgtacgtcagtttagcaaactggtggtttcagccactcacccaaacttccttgaacccgcattctctctcaaatgcggtgcaaatatagggggaacttttggactacgcaaatcttttagcaagattttttttacttgttttttgatgaaagagataacttgctatgtttcaaatgttaaacggattattttttttgagaatattttttctcactattcatgggagaaaacgattaccttattaattattatagaagcctgtggtgtcatcagatttttcacatcagtatttgccattttacgtttgtcttcatggcttcttgagaagtttattaaaaaaaagagcataaaaaaaggctatctatcccagacagccaatctttttgttaaccttaaatctaatactatgaaaaacacattgcaaatatacggagttttgtgatatctgcaaataaatcgggctaaatggcttgatttataacattgattaaataattgaatgtttgattcaatgtttattaaggttctggagggcggaagcgtgtcttcttagctatttaggaatctgtaaggtatccagtacgttgggggaatttacctcttccattaggtgaattcccctaaacaagtaggaattttcaatttcataaggagaattcattccttacttttgtaatatcgaaagataaatgataggattaataaaggaaccattaaaaataaaggaatatgaaaacgaacgcatttagatacttaggactggctttaatggctgtgttaacgttgagtctgacttcttgtgaagtagaaatcgatagtttttatgatgatgataatatcggtggtggttactataatcgttcttctgatttatgtagccgtacatgggtgagtttttatcgggatgtggacggtaaccgttgccgtcaggaactcgacttttatttggaccggacaggcgttgattttattcgggtggaatatcctaatggacatgtggagacattcgaatattatttccgttggaactgggagaattatgcacagacttccattcgcatggattacggtcgcaatgatgtatcttacctggatgatgtatacatcggaggaaatcgattgagcggttatctggatggtcggaataatttcgtagaatatacaggtaggtgagataacagccggcagatggaaagtgccggcaaatgaaaagaaaatgatgattacacaaaagatgacaggtagagagatttcggataacgacaggtagaaagataccacatggaataggttgaaaaggtaaaaagcgataggtggaggtgacaggtaaaaagattgcggataacagacagataatttaaaggataacatataagatttcaggatattaagaatttagagaagagatagggcgcgaaatgaaagcttaaaagttttgaatgggactaaatagtttttatctttgcgccctattagtatgtttaattcatggagtggttatataatctgtttctcgaacattctgccttacaggcagttgtggtgctttcactgatttctgcgattgggctggggctgggaagagtgcatttctggggagtatctctgggagtcacttttgttttttttgcaggtatccttgccgggcacttcgggctttcggttgatccacagatgctgaattatgcagaaagtttcggactggttattttcgtatattcactgggacttcaggtagggcccggtttcttcagttctttccggaaaggaggggtgacgctgaatatgttggcgttggccgtagttctgttgggtactttgctgactgttgttgccagttatgcgacaggtgtgtcgcttcctgatatggtgggtatcctttgcggagccacgactaatactcctgccttgggagctgcgcagcagacacttaaacagatgggcatagagagcagtactccggctttggggtgtgcggtagcctatccgatgggagtgatcggtgtaattcttgccgtactgctgattcgtaaattcttggttcataaagaagacttggagattaaagaaaaggatgatgccaacaaaacctttatcgcagcgtttcaagtacataaccccgctatttttaataaaagtatcaaggatatagctcagatgagttatccgaaatttgtgatttcccgtttgtggcgtgacggtcatgtcagtattcctacctccgacaaggtgttgaaggaaggcgaccgcctgttggtgatcacagcggaaaagaatgtcctggctctgacagtacttttcggcgaacaggaagaaaatacggactggaacaaggaagatatagactggaatgcaattgacagcgaattgatctcgcagcgtatcgtcgtaacccgccccgaactgaatggaaagaaacttggctcattgagactaagaaaccattatggaatcaatatcagccgtgtgtaccgttcgggtgtgcaactacttgccactccggaactgattctccagctgggcgaccgcctgacagtagtaggtgaagcagcagccattcagaatgtagaaaaagtattgggaaatgcagtgaaaagtctgaaagaacctaatcttgttgtcatatttataggcatcgtattgggattggcattgggagcgatcccgttctccataccgggaatcagtacccccgtgaagctggggctggcaggcggaccgattatcgtgggtatcctgctgggaactttcggcccacggatacacatgatcacttacactacccgcagcgccaatctgatgctgcgcgcgttggggctttccatgtatctagcctgtcttggtctggatgccggtgcccatttcttcgatactgtcttccggccggaaggattgctttggatagctttgggagccgggctgacaattatcccgacggtcctggtcggctttgtcgctttcaagattatgaagatagacttcggcagtgtatccggtatgttgtgcggcagtatggcgaatccgatggcgctgaattatgccaacgatacgataccgggtgacaatccttctgtcgcttatgctacagtatatccgttgtgtatgtttctgcgtgtgatcattgcgcaggtgctgttgatgtttttattgggctgacgatgaacattaaaggctggaatttgtaataagtagatgataaatcgttatatttatagcgataaacgataagtcgataaatagcatattgtaaatagtaaaatagtacatataatgactgctcaaagtaatataactcctgaaagcatagttggcgatctccgctacttgcagttgctttcccggagttttcctactattgctgatgcaagtacggaaattattaatctggaggctatcctgaatctgcctaaaggaacggagcatttcttgacagacatacacggtgaatacgaagccttccaacatgtgttaaagaatgcttcgggtgcggtaaaacgcaaagtgaacgagattttcggcaataccctgcgcgaagcggagaagaaagaactctgcacgttgatctattatccggaagagaaaattcagctggtaaaagcccgcgagaaggatctggacgattggtatctgatcaccctgaaccagttggtgaaggtttgtcagaatgtatcttccaaatatacccgttccaaagttcgaaaatccttgcccgcagagttctcttacatcattcaggaattactgcacgaaacgtctgtcgagccgaataagcacgcatatatcaatgtcatcatcagcaccataatctctaccaagcgggcggatgactttattatagccatgtgtaatctgattcagcgtctgactattgactctcttcatattgtgggtgatatatacgaccgtggtcctggagcgcacatcatcatggatactttgtgcaattaccacaacttcgacattcaatggggcaaccacgatatcctgtggatgggagccgcttccggcaatgacagttgtatagccaacgtgatccgtatgtccatgcgctacggcaatctgggtactcttgaagacggttatggaatcaatctgcttcctttggcaactttcgccatggatacttatgccgatgatccgtgtaccatctttatgccgaagatgaattttgccgacaccaattacaatgagaagactttgcgtctgatcacccagatgcacaaggcgattacgatcatccagtttaagctggaagctgaaataatagaccgtcgtccggaattcgggatgagtaaccgcaagctgttggagaagatcgattttgatcgtggagtttttgtgtatgaaggcaaagaatatgccctgcgtgacacaaactttccgaccgtagaccctgccgatccttatcgactgaccgacgaagaacgggaacttgtggaaaagattcactattcgtttatgaatagcgagaagttgaagaagcacatgcgttgcctgtttacgtatggcggaatgtatctggtttccaattccaatcttctttatcatgcttcggtacctttgaatgaggatggcagtttcaagcatgtcaagatacgtggcaaggagtattggggacgcaagttgctcgataaggccgatcagctgattcgtactgcatactttgatgaagaaggagaggatgataaagaatttgcgatggactatatctggtatatgtggtgtggtccggaagctcctctgtttgataaggataagatggcgactttcgaacgctattttctggaagacaaggagatacaaaaggaaaagaagggatattactacacgcttcgcaatcgtgaagatatctgcgatcagatattagatgagttcggggcattgggacctcattctcatatcatcaatggtcatgtgcctgtaaagactattcaaggagaacagccgatgaaggcaaatggcaaattgttcgttattgacggaggattttccaaagcctatcagccggagacgggaattgcgggctatacgcttgtttaccattctcacgggatgcagttggtgcagcacgagccgttccagtccaggcagaaagccattgaagaagggttggatatcaagtcaaccaactttgtactggagttcaattcgcaacggatgatggtgaaagacaccgataaagggaaggaacttgtgacgcagattcaggatttgaagaagttgcttgtggcttatcgcatcgggttgattaaagagaaagtataaataagtaataggtaataagtattaagtattaggtaataagtattaggtattaaccgtagctgccatttagagacgcatctgtctgtcattcagacgactgtaaggaggaagaatctcttctttgtgactacaaaagaggagatccttcgacaagctcaggatgacagatacttatgctcgtcattatcgaattgtttcactttgataaagtgaagaaaactttgaatgacagatagatatacctctaaatgatagctacggttaatacctaatacttattacctaatacttattacctaatacttaatacttattacctattacttattaatcagccttagaagaggacaatacctgcttctatgatcgctcctttatcgaaattaccggatttgttgtaataccgtgtcagtccgtaaccaccggtggcaaagatgccgaatttcttgctgatctgatattccagattcgctcgtgcctgcaatccataaagccgtcggggaatcacttcatccttgttggagcacgtttctatatgctggaatccgaggtcaccgctaatggacaaacctttgtaaacaggtaccgccaatccggcacggtaagacgtgctgatagaaaatttatcgttcagattctgatcgaatgcacccactcccaagatcgtataaaacagttggttcttgaaacgcactcctatgttggcgggcgtgacgttaccgccatataccatcatttgtattcttgtatcgggattcgcgttcacgaggccgagttgtaatcctttcatatcttccctgtagtaattgaccagaccgatctgaaagccatgagccttcgtcgcatagttgcataacccgatctgtgcgccattcaggtcttttgcggtgatattggcgataccggcaatctgcagaccgttcatgttttcgcctaccacattcaagagtccggaagtcatcataccgttgaaactctgtcccgtgatatttgacacgccggaaaactgaaatcccgaagccatgtttcccgtcacattcatcagaccgcttatcattactcccgagttgttgtctccaccgatgccggtaagtcccgaaataatgaccccctttgagccgtcgcctgtgatattcactagtccggcggcggaaagccctacggtgttgtttccgctgatattgctgacacccgctatctgaacaccccgcatcgtaccaccggcaagattggctaatcctgtgatctgtactccgttcatatctccatgaatgacgcttcccagcgcgttgatgccaacgccgttgagacggttcagcgtagacagcagaccgaggtttacataagtcgtctgagtgctgtcatacggctgtgtgcagatgtctttccataaggaaaggttgatgcccgcactcttgttctgtgccggcaaacaaacggcagccatcagaacagctgccgtgaatattgtctttattatcttcatctttattataactctttttttcagtttaggttcacagagtattcccttaatccttcacttcctttatcctttcgcttcctgatacagatagcgtttgatgctcttcttcggggtcttttcaaattcttcgggatatatcttcatttttagtatttggctgtatgccggtaacatggcgttcagtgctacgcggttttcttccattacccgttcgatgtcctcattcttcagaccatgggcgaatgcttcgtcaaagtccggataaaccagtccgacgagtttctcgttctgctgtacgatgatgctttccgatacgtatggcagattgttcagtttatcttcgatttcttcggggtagatgttctgtccgctggcgctgagcaacaggttcttgctgcgtcccttgatggtgatattgccttcggcgtccatcaaggcgaggtcgcctgtgtgcagccagccgtctttgtcgatcactgcttctgtcgcttcgctgttcttgtaatatcccagcattacgttaggccctttgcagacgatttcgccaacgatattttccggatcggaagacagcacccgtacgtccatacgcggcgcggcttttccgcacgaacccggcttgaatcttgtccagtcttcgtagcagatgatcggaccgcattctgtcatgccgtagcctactgtataagggaagtctatcattttaaggaattgttctacttcctgattgaaggctgctccacctacgatgatttctctgaaatttccaccgaacgctttgatcatttcttcgcgtatggttgcttttatcttgtcgttgatgatgggtactttgagtaagattttcatggtcggcgtttccagtttcggtagtacgctcttcttgataatcttttcgatgatgagcggaacggcgacgatgagattcggttttacttcttcgaatgcctggaagataatcttcggactcggcatacgggtgaggaagtagatatggcagccgacggagaactcatagaggaactcgaaggccagtccgtacatatgtgccataggaagcatggagacgatcttgtctccggctttcagttcgagcacttcatacgcgaacttggtgttcgaccagaggctacggtaggggagcatgactccttttgagtagctcgttgtgccggacgtgtagttgattactgccagttcttcgggttcatccttatggtattcgatgtgttctttgcggaagttcttcgggtatttcttgccgaacatttcgttcagatgttcacgtgcgtgcgtcagtcgttcgctgcgtgataccagtaaggtgaagtcgttcatcatcagaataccttccagcaggggcattgccgattcgttgaggttttcccacaccatgtctcctacaaatagtaatttggcttcggagtggttgacgatgttgtgcacattgtccgccttgaactcgtgaaggatggggacgatgactgctccatacgtcagtgtggcgaggaaagtgactccccaatgggaactgtttcggccgcaaacggcgattttgtctcccttgcggattccgctttcttcaaagatgatatggagtttttcgatttttcgagcaacgtctttatactgaagggtggctcccttataatctgtcagggcgtctaagtcccaattgttcttgatactattttcaatgtaagctataaaactcttttccattgtttttgcacatttggtattaaattgtgcaaatatagtaattaaattaagaatgaagaattaagaatgaagaatttttggaaatggggagtcttggggtaataagggactaagatgtggaagtatgggaaaagtgttgggaagtataggggaaggagttgtgccacgcctttggcacaagtgtttccggcctgtggcacgattgttccttacagatgacattactgttctctctataagaaaaggaagttatcaatgcttgttagggtcgataagaatgcatggtaatgtcattaacaatgcttgttaagacagtccacaatgcatgtcgcagtcattaacatggattaatccgaaaaaccggttgttttcagtctgttcctaatgagctgaattagaagtcggtagtgtcttacttctcctccttcgggaaggaggagtacccgtagggggaggtggtaggtaagcatataacttaatttattattattagtttatgtgttcacctaccacctcggtcttcgaccactcctccttcccgaaggaggagaatgtagatactaccgactttttagtcagccccaatgcggatagttctttttgaatttatttcaagtaccattcgtacattctccgtactccttcctctatttctattttgtgatgccatcccaaagagtgtagtttggacggatcggtcagtttgcgcatagtgccgtccggtttgctgctgtcgaaggttagtttgccttgatagcctaccgtttctacaattcgttcggcgagttggcggatggtgatttcctttcccgttccgatgttgatatggcagttgcggatatccttgtcaccttctttgtaggtatctttgaagtccacgtgttccattacgaatacactggcgtcggccatttcttcgctccagagaaactcgcgcaggggagttcccgtgccccacagagtcacttccgtttcgctgataccgtatttgcggaggatattcagaatgtccgccttggggctgtcgccattgacgccttctacaggacgttggttcatatccttgcggacagcttcccagtctccttccttcagacagtgcgcaagatgaatcttacggatcatggcaggcaggacatggctgcgttccaagtcaaaattatcattcggaccgtataagttggtcggcatcacggcgatgtaattcgtgccgtattgcaggttgaagctctcgcacattttcagtccggcgatcttggcgatggcgtatggctcatttgtgtattccagtggtgaagtcagcaggacttcttctttcatcggctgttcggcgtcacgcggatagatgcaggtgctgcccagaaacagcagtttccggacgttatgacggaaactttcaccgatgacgttctgctgtatttgcaggttcttataaatgaagtcggcacgataaatactgtttgccatgatgccgcctacgaatgcagcagccagaaacacatactccggttgctcttcgtcgaaaaaacggcggacagctacaccgtcgagcaaatccagttcttgatgcgtacgcccgatcagattggtatatcccttatcctgtaaattcttccagatagcagaacccaccaaaccgtgatgccctgctacatagatttttgcattcttttccatgattaagtatcatatatgaacacggattactccggttatgcgcatctcatgtaaaaaatgaagatcgttgaatcggcgtaatccgtgttcggtttgaggtctgttagtgcttggtagcgatcattcttcttactttttccatgtcatggcgcaccatgatgcttaccagttctccgaacgatgtcttccttgggttccatcccagcaatgtccgggctttggtagggtctcctaacagttgttccacttctgccggacggaaatatttgggatcaacctctaccaatacttttccggtagccacgtcgatacccttttcgtccacgccttcgccttcccaacgaagttcgatgcctgcctccttgaatgccagtgtggcaaattcgcgtacggtgtgcatctctccggtggcgattacgaaatcttccggaacgtcatgctgaagaatcagccacatacattccacgtaatctttcgcatacccccagtcacggcgggcatccagattacctaaatacagcttgtcctgctcgccttgtgcgatacgtgcggcagcgagagaaatcttgcgggtaacgaatgtttcgccacgacgttcgctttcgtgattgaacaagatgccgttaacggcaaacatgccatagctttcgcggtagttcttggtgatccagaagccgtattgctttgccactccgtagggagaacggggatagaacggagttgtctccttctgcggaacttcctgcaccttaccgaagagctcggaggtggaagcctgatatatccttgttttcttttccagtcccaggatgcgtacggcttcgagcatacgcagtgtgccgatagcatccgcttcggcagtatattcgggcacgtcgaacgataccttcacatgactctgtgctgccagattgtagatttcatccggttgcacctgctgtatgatgcggatcagtgagctggagtccgtcatatcgccgtagtgcaggttgatggtacgtttttgtttcatgtcgcgtacccattcgtcaaagtacaaatgctcgatacgtccggtattgaatgaggaagaacgacggaggataccgtgtacttcgtaacctttttgcaagagaaattcggcaagataagaaccatcctgtccggtgatgcctgatataagggctgttttcatattcctttattttttatttgaaaatacgggggacaaatttcgttattttatgctgtatatgcaaaccaagtctgttttattttcccgttccttttcccattactttgtctatgatcaacgcgatggctccgtcgcccgtcacgttgcaggcagtcccgaaactgtccatggcgatgtagagtgcgatcatcagcgcctgtgccgactcgtcgaagccgagcatcgattgcaggataccgagtgccgccatgatggctcctcccggaacgcccggtgcagctaccatcgtgatgcccagcataaagatgaatccggcaaacagcgggaagtcgaacggcattccttgcatcatcatcagtgccagtgcgcaggccacgattttcagcgtgctgccggacaggtgaatggtggcgcagagcggaatcacgaatcctgcaatgtcggcggatactccgttcttcttcgtctgctccagcgtcaccggaatggtggcggcggacgattgcgtgcccaatgcggtgaaataggccggcatcatcctgcccaacaaccggaacggattcttacggacgaagagtgccgcaatggaatactgaaagacgagcaggaagatatgtaacagaaagataactccgatgattttgataaagaccatcagaatggcatatacttgtccggaatgagtcatattcaggaaaatgccgaagatgtaaagcggcagtaaaggcaggatgaccgcactgatcatgcgcacgatgatttcctgaaaatcccgtgctacactcttcagagcatcgctgtgcagtgccgccagtcccaatcccagtgtgaaggcaaggatcaatgccgtcatgacattcatcagcggagggatggatacggagaagtaggggagaatgccgtgcgcttcgctgacttcttcgagcggtacgcccacttcgatgagcgaggggaacacggtgacaccggtgaagtaggacaggaagccggagaagagcgtcgcgccgtaagcgatgagggcggtgacaagcagcatctttcctgcacctttgccgatgtcggcaatggctacggtgaccagtccgacgataatgagcgggatggagaagttaagaaattcactgaaaattccgttgaacgtaacgaatattcgtaccagcggagccggaaaaatagtgccaatggcaatccccaagatgatagcaataatgatgcgtggcagcaggccgatcttgattttcttcattctgatagttatttgttgaccacaaaaatagtattttaatccaaaactagcgaacaaatgtgcttttcaagtgtttcttacataaacaatattttaaaatatataagatatggcaaatcagaataaaacagatatcgggttgatcggtctggcagtgatgggtgagaaccttgctttgaatatggaaagcaagggctggcacgtctctgtttataatcgtaccgtccccggagtggaagaaggagtagtagaccgctttatgaatggtcgtgctaaaggtaaaaacattgaaggttttacagatataaaggcttttgtggaatcaatcgccacccctcgcaagattatgatgatggtacgtgccggcagtccggtagacgaactgatggatcagcttttccctttgctttctcccggagatattctgattgacggtggtaattctaattacgaagataccaatcgccgtgtaaaattagctgaatcgaaaggattcttgtttgtaggaagcggagtgtcgggcggtgaggaaggtgcgttgaacggtgcttccatcatgcccggaggatcggagaaagcgtggccggaagtgaagcctgtcttgcagagcatcgcggcgaaagcgccggacggaactccctgttgccagtgggtaggccctgccgggtcgggacattttgtgaagatgattcacaacggtatcgaatacggtgatatgcagttgattgccgaggcttactgggtgatgaagaatctcattgatctgacgaacgaggagatggcggacgtttttgcccgttggaatgaagggaagttgcgcagttatctgattgagattacttctaatattttgcgtcacaagaataaatccggtgggtatctgatcgataagattctcgatgctgccggacagaaggggacgggaaagtggtctgtcatcaatgcgatggagttggggatgccgttgggcttgattgccacggcggtgttcgaacgcagtctctcggctcagaaggagttgcgtcatctggcttccaagcagttcttgtgcaagcatacattacctgtatataataaggcggaattggtgaaggagatattttctgccctttacgcttccaagctggtgtcgtatgcgcagggctttgctgtgttgcagcgggcttctgatgctttcggatggaatctggacttggcttccattgcccgtatgtggcgtgggggatgtatcatccgcagtattttcctgaatgatatagctgctgcttttgaggcggcggataagccgaagcatttgttgctggctccttacttccgtgaggaaatcaagtctttgctacccggatggaagaatctggtggcggaggcgatgaaggaggaattgcctgttccggctttctcttcggctttgaattatttttattcgctgacttctgacaatttacctgccaatctggtgcaggcgcagcgtgattatttcggtgcgcatacgtttgagaggaaggatgagttgcgcggacagttctttcatgagaattggacgggacacggaggggagacgaagtcggggacttataatgtctgagtacttttcttttgccttgatgcaaaagaaaggtaccaaaagaaaaaatcaaggctgcacctacggagctactccggccgcatctccggctaaagggcaggaactcgctccgctcaaacagcctgcccttcttcacgccggagatacagcctccgcttgacgctccttcggtgaggccgggagaccgttcggatggtaagttgtaggtgggggtagtagtgggtgtgtgggtgattatgcgttagggcggttggttgagattggtcggtttgtcggttggttgaggctggtcggtttaggtgcggtgatggatggataaaaggtaaaaagttaaaaatacgacgatggataaatttgcaatgattatttttggtgcttcgggcgacttgactaaacgcaagttgatgcccgcattgtactctctgtatcgggataaacggctgacggggagttttactgttctgggaattgggcgtactgtctattctgatgaagattaccgttcatatatacttggggagttgcagcagtttgtaaaggctgaagagcagaatttggagctgatgtcttcttttgtgtctcatttgtattatttgccgatggatcctgcgaaagtggagggatattcgcagttgcgggagcgtttggtagagcttacgaaggaggtcgatccggataatttgttgttctatctggctactccgccttcgctgtatggggtggtgcctttgcatttgaaggcggccgggctgaatactcctcattctcgtattattgttgagaagccattcgggtatgatctggagtcggcgcttgagttgaataagatttactcttctgtgtttgatgagcatcagatttatcgtatcgatcattttctaggcaaggagacggcgcagaatgtgcttgctttccgtttcgccaatggtatttttgagccgttatggaatcgtaattatattgattatgtggagattactgctgtagagaatctgggtattgagcagcgtggaggtttttacgagacggcgggggctttgcgggatatggtgcagaatcacctgattcaactcgtagctcttacggctatggagccgccggcggtattcaatgcggataatttccggaatgaggtagtgaaggtttatgagtcgctgactccgcttacggagacggacttgaatgaacatatcgttcgcggacaatatacggcttcgggcaataagaaggggtatcgtgaggaaaagggagtggctcccgactcgcgaacggagacttatattgcgatgaagctgggcatcagtaactggcgttggagcggggtaccgttctacatccgtaccggtaagcagatgccgacgaaggtgacggagattgtcgttcacttccgcgagacgccccatcagatgttccgctgttccggcggtaactgtccgagggctaataagttgatccttcgtttgcaaccaaacgagggtattgtgttgaagatcggaatgaaggttccgggtgcaggtttcgaagtccgtcaggtgacgatggatttcagttacgcacagttgggcggcgtgccgagtggtgacgcttatgcccgtctgattgacgactgcattcagggagatccgaccttatttactcgaagtgatgctgtagaggcttcctggaacttctttgatccggtcttacgttattggaaagataatccggacgcacctttgtacggctatccggcaggtacgtggggacctctcgaaagtgaagctatgatgcacgagcatggggcagactggaccaatccgtgtaagaatttaacaaatacagaccaatattgcgaactatgaaactatctgttttcccgtcgtctatggagacagcccgttcgttgatattccacctggtggatatcatgaatgctgaaccggacaaaacgttcaacatagcagtgagtggtggcagcactcccgccttgatgtttgatttatgggcaaatgaatacgctgatattactccttggaagcgtatgaaactttattgggtagacgaacgttgcgttcctcccgaagattctgatagtaattatggaatgatgcgttccctgcttttggggatagtgcccattccttacgaaaatgtataccgcattcgcggtgaagagaaaccggcaaaagaagcagcccgctattccgaacttgtcagccggcaggtacccaagaagaatggctggcccgaatttgacattgtgctgttgggagcgggagatgacggacatacttcctctatcttccccggacaggaggctttgctctcttccgaccagatttatgtgaccagcactcatccccgtaacggacagaaacgcattgcaatgaccggatttccgattctgactgcccgccttgttatttttctgattaccggaaaggcgaaggcggaagtggtggaagaaatctgccactcgggagatacgggaccggcggcttatatagcgcatcatgcggagaatgtcgaactctttatggatgccggagccgcgatgtatgtgcggaatgactgaaaagagagagacaatataaagacaaagtatattatatataagaagagagagtaacattggagaagagagaagctcacggggtcgaagccgggagcttcttgcctatgtagccattcggttttgattcggttttatcaccggatatatcttatgggcgaaactaaaaaactaaaattaaaagaatatgaatccatttcaaaattcgttcggcggtcatatcccacaggatgtggccggaaaacagggagagaatgtaatatttatagtctataacctgacagattcccccgatacggttgataaagtaaaggatgtatgtgccaatttctcggcaatgatccgtagtatgcgcaatcgttttcctgatatgcaattcagttgcacgatgggattcggggctgatgcgtggacgcggcttttccccgataagggtaaaccgaaagagctgagtactttctccgagataaaaggggagaagtatacagctgtttctactcccggtgatttgttgttccatattcgggcgaagcagatggggctgtgtttcgagtttgcttctatccttgatgagaagcttaaaggggctgtggtgtctgttgatgagacgcatggatttcgctatatggatggtaaggcgattatcggctttgtggacggtacggagaatcctgctgtcgatgagaatccctatcattttgcggtgataggcgaggaggatgcggattttgcaggaggcagttatgtgtttgtgcagaaatacattcatgatatggttgcgtggaatgcgcttccggtggaacaacaggaaaaggtgatcggacgtcataagttcaatgatgtggagctgtcggacgaagagaagccggggaatgcgcataatgctgtgaccaatatcggtgatgatctgaagattgtacgtgccaatatgccgtttgccaatacttcgaagggggagtatggtacgtattttattgggtatgctagtacattcagcacgactcgccggatgttggagaatatgtttatcggcagtccggcgggcaataccgaccgcttgctcgatttcagtacggcaataacggggacgcttttctttgtgccgtcgtatgatttgctgggcgagttgggtgagtaaatcaccggacggtgcgaactagataaaacgtggtgggaagttcggaaaagatggttatgttttccggatttcccaccacgttttactctttgaactctgtttctttttgtactttcttccgaatttcatgaaataaaggggaaaaagtgagaggagtgagagaggatttctaacattcgtattttttttagttgaaaattagagagtagaaacagtgaaataaaaatataaaagttgcaattcctccctcacacctctcacttttttaggataaacttctttttcctatgccctttgtactattgtcggatcattgggagatttctttaagaaatcgtttctgataacgtatgcatccatcttctctgtatcgaagggtttcagtaaagaagctatttcggccttgctcaatgagggattgagccatttctcttcctcctcttgggtgagtatggcgggcatccggtgcttggtgttatcgatgtaatcggtcagcgaattggtgtcagtggtgatgatggagaaagtttcgtgttcctctcccgtatccttgtccagccaacggtcgtagatgccggccatcgagaagataggttcatctttcacatatatataataaggtattttgtttgctccttcatgcctccattcaaaatagccggtactgggcactatgcaccgtttcttcatgatcggttcgcggaaagacggtttctcgaaaatggtatccgcacgggcattgagtgtcatctttcttatttctgtcgcatcctcttcgcttcttacccagaaagggatgagtccccagttgaaaacctgtacttcgtccgaagaagtaatgataggatatctggggaaagtgaacgcattcacatgatactgttcgtcaagaatgctttggtaaatctcgactacatccgattggcgtccgtaacgggcggcaactttgatggctttggctgacatggagttgtggaaacacatattatctgcaattaatgtttataatttggttgatatcagtagtataacgtccggagagctgttcttgtttgagcatcccccctataaacaaacggagtcaagtctttgctcgcaaaaagaaatgtattaagatttaatagaatataaaagagctttaggtataatcaaactttatgttatttttctttgatttagtgctatcgtccagcttgttctataaatagataaataaaaagtgcttcctagatcgtccgccgacgaggaagcactcaacacaaaaactaaactagacttaactaaactattctattcttggaatttcacaatccctttctgttcgttgcaaagttacatataaaaccgatttctgacaaactataatcgacaaaattcacttttttgccgataaattagacaatcatcagcttctttcatccaaaaatgcctgaaaaacctgcttgtaactatcactaatggggatatacgttttgtcaaagacgatacgtccacggtcgatcacccgtattttgtccttttggacgatgaatgaacggtgtacacgtatgaaccggctggaaggcaaaagctcttccatggctttcatgctcatgagtgacaagatgggtttggtatcatcttccgtatatattttgatgtaatctttcagtccttcgatgtacatgatctttttcagttctacctgtaccagcttatagtcgctttttacaaagatgctgtctatctcttccggcttctgcaccagctcgaaccattgcagggctttattggctgcttgcaggaaatcgacatacgagatcggtttcagcagataatcgagtgcattgacacgataaccgtcgatagcgtattgaccgaatgcggtggtaaaaacgatacgcgtacgggaatctaccatttgtgagaactccagtccgttaagttccggcatctgaatgtcaaggaaaagaagatcgacttcttcgcccggcaactccttcattgcctgaactgcactggaatattttcctgtaagttgcagaaacggagtcttattcacataactttccagtaggcccagagccaatggctcatcatctacaatggcacaacgtaatatcataattctctatattttatttaattacctaaaccgaatatactctcaattattacctattacttaatacttattacttattaatactctccctcacacggatgctcagccttgatctatactccttgccgtcttccgaaattcctttctgccaggtatactggcctggataaagaatctccagtcgtcggttcacctgttccagtcctatccccgaaccactcttgtccattatgttcttcgggtggttgctgttgcttatctcgcagatcacttccgtctcattttccgcaagatggatatggataaaactccgttccgtaggcgatataccgtgcttgaaggcattctcgatcagcgagataaagataagcggtgcgataagagtccgactgtccggcagtatatcaatctgcgtagtcatctgtacattggaagacaggcggatgcgcatcagttcgatatagttgcggataaaggcagtctctttgcctagcgggacgtaggtctgctgattatcatacaacacatagcgtaggagcttgcttagttcctgcacagcttgttgcgccttgtctgtatcaaaagcaattaaggcatagatattgttcagcgtattgagcagaaaatgcgggttcagttgattgcgcagattcttcagttccgcttccgaacggttccgttccgcttccttacgggcagcttccgcttgtgtccatcgggcactcatacgtatggcggcactcagtccgatggtgaagacgagactcagcatatctctgacaaagaacagccatcccggaggaccacccgaccggtgaggcttgggaacaaaggaaggatcgaatgtcagactccgccaaaggtgcagcatcagaccgatgacacacaacaggagaatattgtaagtaatatacctcttggtctggctctgaaaaagatatcggggaaccagcaggaaatagttgacgtagaacgcgatcatgaaagacaacggtacggcagaatggcgtaagtatgccatccagttgatgtttccgttttcgcgctctacaaagaagaacggaaaaccgaacataatcccccagccgataatgtgtatcagtgcttccaggggacgacgtgcggatgttaggctttgtttcataaagacaaagatagttttttattcgtatctgattgcctctatcgggtctaaatctgctgctttctttgcaggataccatccgaagaagactccggtgacggtgcagactgcgaaagaaaggaagacactccaaggttggatgaagataggccagtgtgccacgctcttcacgatccagctggctccgcagcctatgatgactccgataagacctcccgtaatactgatcatgatagcctcgatgaggaactggctcagaatatcaacgccacgtgcgccgacggacatacgcagaccgatttcacgggtacgttcggtgacggacacgtacataatattcatgataccgataccgccgaccaccagagatattccggcaatacaggcgagcagggtggtcatcagatcggtggtagagtttagcatcgtactcaactcctgttgggtacggatggtgaaatcgtcttcgtccgaagctttcaatttatggttgcgccgcaggatttccgtgatttcatcggtagcatactcggtcatgtcttccgatagggcagaagcaaagacaccctgaagataggtgacggcaagcaatcgtttcatgacggtggtgtaaggagccagtacgatattatcctgatcctgtcccatagagttgtaccctttggctttgagcacaccgaccacccggaacggtatcttgttgaagcggatgattttccctatcggatcgcttccgtccggaaagaggttgtctacaatcgttttaccgatcacgcagaccttagccgaactctgtatgtcggcttccgtaaacatatctccgctttctacactcagctgacggatgtcgagatactccagcccgacaccgctgacggatgacgggtagttgttgttacccgcgataagctgtcccgacgaagacacattaggactgatggcggacaggaaattggtctcatcgcgcaaggcctcatagtcggtcagcttcaacgtctgcatagccgatgggtcttgccggacacccccccgtctgtcggctcccggatggatcatgatcatgttcgatcccatctccgatatctgttgctggatgcttcgcttcgatccctgaccgatagcgagcatcgtgatgacggaagcgacaccgatgatgataccaagcatggtgaggaaagcacgcagcttgttgttcgccaatgcccggagagctattttaaataagttagttccattcataaactactgttacttattacttaatatttgatacttaatacccaatacctaatacttattacctattacttatcttcaatcctcgtcgcttttgggcaatgcggccagtgcttcggcggcggacaggacatgagagttgactgtatcttcaatgacatgaccgtcgcgcaggcggatgttccggctgctgtattgcgcgatttcgggattgtgcgttacgaatataatggtacgtccttccgcatgaagtttctggaacaggacaagtatatcaaaagacgtacgtgtgtcgaggtttccggttgcttcgtcggcaaggatgaccgcagggttgtttaccagtgcacgggcgatggctacgcgctgcatctgtcctccggacatctggttggacttatgctccaaccggtcgcccagacctaccgcctgcaacgcttcgacggcacgctggcgacgttcggaagcgctcactgatgagttgtacatcagcggtaactctacgttttccacagccgtcgtcttgggcagcaagttgtagctttggaagacgaagccgattttccggtttctcagtacggcacgctgaggcttgctcatggtgcgcacggagatgtcatcgagcagatactccccgctggtaggagtgtccagacagcccaacgtgttgagcagtgtggactttcccgaaccggaagtacccatgatggtcacaaactcaccttcgttgatggtgaacgaaacgccccgtaacgcatggacggtttcttctcccacctgaaagtctcgtttgatattttgaagttcaattacttttttcatacttggctacttgttgcttttctttttgttgtttcccggagggcctggcatgaacgggcttctttctccgtttccctgccccggttctctattcatattctcgtccggcatagcaccgatagtggcttccgtgacgactttggttccttcggcaacaccactgatgatctctgtggaaataccgttactgattccgatttctaccggatgggctgtaaaggtggttccttcgcgcgtccataccttatgttcgccttcgcaatctttcacgatatcattcttaccgatcaacggtgcttcgggggtgaaacgcaaagctctgttggggacagacaatacatctttcttatcaaggataaagatagtcacattggctgtcagacgcggtttcagcttcaagtccggattcggagcagagatcactacttcataagtgactaccgtgctggtacttgaactggcgctgctgctactgcttgcatctcccagacgaatctgtgtcacgactccgtcaaacacatcatttggataagcatcgacagtaaagctggcgcgctggccttcttcaataccgcctatatctgcttcatccacgtctgccactacctgcatctgtgtcaggtcggccgcaatggtgaagagggtaggagtttcgaacccggaagctacggtctgtccggcttctacatcgcggctgatgacaactccgtctatcggagaagtaatcgtagcatatgacaggttacgttctgcctttgccagagatgccttgctgctgtcgaaagcgctcttggccttctgataattatagagagcctgctcgtagtcagtatcgctgatcaatgacttatcgtgcaatcccttgctacgttcgtagttcttcttctgatattcaaattcggctttggcaccatcgtaagttgcctgctgggatgccagttcactctgtaaagtgacacggtccatctcggcaatcagctgtcctttggttactaccgagttgtaatctacataaattttgtcgatgataccggatacctgcgtaccgacttctacttctatcaccggttcgattgttccggtggcagtcaccgaattggagatatcgcctttactgacagtcgcactggcatacatcaccttgtgctttgccggagaacctgtaaagaaccagattcctccgcccactactacggcaactgctacagcgatcaggataatctttttcgttttcattctatattctgttttacttatttatattccgcttttagtaaggaagaaggcttataatgccagtttgtctccctgatagaacttcagcaactgagtgttcagtatcgccatgtatttggcttgaagctgctcctgctgtgcttgtagcaagttgttcttttccgtcagcaactctactgtattcttcatgcccagattgaactgttcgctgattaggtcgtagctgatctgtgtacttttcagcttctcgttcgctgccgcataacgttgctgcgcactgttcgcatccagccagagtccttcgatggtcttatacagtgttttctgttcgtcgagcagcgacagcagacttgtttcgcgctgtaacttcgctttctgcacggcactcttggtctgacggttattgaagataggaacgctgacagaaactccgatggagttgttccatccgttctttacctgttctccgaaggtgaagtcactgccgctggtgtggttcgttccgatacctgcactcagactgatggtggggagatatcccgctttggcgatatcgatacccagttccgaagcctctacgctcagtttgctcgcctcgatttccggacggagggtgagcgcgctcatatacacatctttcttggtgggcaatggcaacagtacgttttcgtcggacagggcggggagatagacattcatttcattctccccatccaattcgagcagttgtttcagttgtaatttgtagtcctgcagagtggcttgcgctgttactaattgataacggtcggtgctgacttgagcttccagttgtgccagatcacttttggcaatgcttccggcattcagaagttcctgtccgcggtcgcgttgcgcaatggaaacttgcagcgtgttttcattaaccttgacggactccgctgcatagagaatctgaatgtaaatctgagcaatggattcctgaatactattctcggacgtttctacatccagattggctgcctgattgttcagcttctcctgtttgatggtgttcagtcgcttgctaccattataaatggtccacgaagcattcagaccataattgccattgtaactggtcttgctggttgtctcgatcacctcgcttccgctgatcgttctgcttgattcctgatacggacggttcaccatgttctggctcgttgagaacgacagactggggaacagggcagctttggctgtcttcacatcgatctgtgtactttccgcattcacccggtttttgcgaatcgtaatgttctgttgcaacgcatagtcgatgcacgactgtaaatcccattgggcggggagattcatctcgctctgggcggctgtctgcacagaagattcctgggcggatataccgggcagcagacccgctccaagaaatgctatcactgtcaatcttcttacatttatcatatttttatatgtctattgatttactggaacgaaggtacgtacatattatattagctgcaaaagcgatagacagatggcgctttttcgccgttaaatgttttttttctgtcgataggcaggttttttgagaaaaaccatacaaatcatgcaacattttgccttacttgtttgttttaattataaaaattgtatatttgtactcattacaaattctaaggtcagcttatgaagaatacactgcttgcaatatggaacttttatttggagggtttccgtagtatgacgttaggtcgtactttgtggcttattatcttagtgaaattattcattatgttcttcatcctcaaaattttcttctttcccgactttctcggcgatcatcctacagatgccgacaagggtacgtatgtgggaaatgagctgatacagcgtgcacttccggagaaaaccactgatttttaactcttaaactacataagattatgattgaaagtattgacacctcgctgatcgattggtcgagagcccaatttgcgatgacagccatgtaccactggattttcgttccgctcaccctcggactggctgtggtgatgggaataatggagacgttgtattataaaacaggcaatgaattttggaagcggacagccaagttctggatgaaacttttcggtatcaacttcgccattggtgtagcgacaggattgatcctggagtttgagtttggtacgaactggagtaattattcttggtttgtaggtgatattttcggtgcaccgcttgctattgaaggtattctggcgttctttatggaagccacgtttatcgctgtcatgttcttcggatgggataaggtgagcaaacgcttccaccttgcttctacctggctgactggtctgggggctacgatctccgcttggtggattctcgtagcaaacgcatggatgcagcatccggtaggtatggagttcaatcccgatacagtgcgtaatgagatggttgatttctgggcggtggcaacttcgcctgtagcggtcaacaagttctttcatacggtattgtccggatgggtacttggtggcgtgttcgttgtaggaatcagttgttggtttctgctgaagaaacgtaatcgcgagtttgcgcttgcaagcataaagatcggtgctatcttcgggcttgtctcttcactgctggctgtatggacgggcgatggttccggctatcagattgcacagacccaaccgatgaaactggcggctgtagagggactttatgaaggaggaaccaatgtaggtctggtgggaataggaatgctgaaccccgaaaagaagacttacaatgatgggaaagaccctttcctgttccggattgagatacccagtatgctttcgttccttgccgagcgggatgtggacgggtatgtccccggaattaccaatattatcgaaggcggctatcagctgaaagacggtacgactgctttgtcggcagccgaaaagatagagcggggtaagaccgctatcggagcgctggctgcttatcgtgcagcgaagagcgccgggcacgaggaagatgccgctgttgcctatcaggttttgcaggagaatatgccatacttcggatacggatatattaaagatgtgaatcagctggttccgaatgttcctctgaacttctacgctttccgtataatggttatcctgggcggatattttatccttttcttcatcgttgtgctcttctttatatataagaaagatttgagtaagatgcgctggatgcattggatcgctctgctgaccattcctttggcttacattgccggacaggcaggatgggtggttgccgaatgcggtcgtcagccttgggctatccgcgatatgcttcctacatcggcggctatctctaaattggatgtaggctccgttcaggctactttctttatcttcctgatcttgtttaccgtaatgctgattgcggagatagggattatggtgaaggcgattaagaaaggaccggaagaagagataagtaataggtaataggtattaagtaataagtattaagtattaatcgtagctgctggctgatttgtcatcatggttgacgttattacttattatctattacttattacttgatactatatattgcttattacttgagctaatacttaatacttaaaacttaatacttacatattatgtatatatttctacaacaatattggtggctggtcgtttccttgctgggggccatacttgtatttttattatttgtgcagggaggaaattctttgttgttctgtttgggtaagacggaggaacatcgtaagatgatggtgaactctaccggacgcaagtgggagtttacgtttactacgctggtgacgttcggaggtgctttctttgcttcgttcccgttgttttacagtaccagtttcggtggggcttactggctttggatgattattcttttcagttttgtgttgcaggctgtgagttacgagttccagagcaaggcagggaatttgctgggtaaaaagacctatcagactttcttggtaattaatggggtagtaggacctctgttgctgggtggagcagttgctactttcttcaccggttctgatttctatatcaataaggcgaatatgacggatacgattatgccggttatcagtcattgggggaatggatggcacggactggacgcgttgactaatatctggaatgttattctcggactggctgtattctttttggcgcgtgtgttgggttcgctctatttcattaatagtatagcggataaggaactgactgataagtgtcgccgtgcagtattgaataatactattttcttccttgtattctttttggcatttgtaatccgtacattggtttctgacggatttgcagtcaatccggatacattggaggtttatatgcagccttataagtactttatcaactttatagaaatgccggtagttctgatcatcttcctgataggtgtagtattggtactttttggaatcggcaagacggttctgaaaaagactttcgacaaaggaatctggtttgcagggataggtacggtgctgacagttctggctttgttactcgtagccggatataataacactgcttattatccttcatatacggacttgcaaagttcgctgacattggctaacagctgttcgagtgaatttacgctgaagactatggcatatgtttctattcttgttccgtttgtgatagcttacatattctatgcatggcgtagtatcgaccgccataagattacggagaaggagatggatgaaggaggacattcctattaaggtaatttcgatagacattaaaagaagaggatgtgtcaaactccccttttaacgaaatcatcctcgctacaactatctgtggcgaggatgatctttaatctatgagggtttcgacatatcctcttaggattagctactctcttggcaatcctatttattcactacattttccggtgttccggagatataagcctgtagattgctaatggcaatattcatcagacgttcacgagcttctgtgcttgcccatgcgatatgcggagtaatgtagcagttctttgcagtcagcaacggattgtctgcacgaggaggttccgaagaaagtacatctactccggcagcataaatcttaccactattcaaagcatccgcaaggtcttgttcgttgatcaatgggccacgacccgtattaatcaagatagcattcggcttcatcatggcaagacggcgtgcgttcactaattcgtgagtttccggagtgagcgggcagtgcagactgataatatcacactcgctaaacaactgatccaaatccatcttcttgatttccggtggcaactggaagtgagactttgaagttaaagcatatacctgcataccgaaaccgatggcaacgcgagcagtagtatatcctgtatttcccaatccgacaagaccgattttcttatcccgcaattctatcaacggagtatcccaaaaacagaaatccttgttattggtccaacggcctttgtggacttcttccgaatgatgttgtacttgctggcagatattaagaatgtgcgcaaataccatttgtgcaacggaagctgtgctatatgcagggatattagttacaataataccacgttctttggctgctgccgtatccactacgttgtatcccgtagcaagcacaccgatatacttcagttcgggcaaggcagccatgtgatcggcgttgatgattactttattcgtcagaatcacttcagctccggctgcgcgttccaatacttcttcggggacagtacggtcataaatggtacattctccgagagctttcaaaccttcccatgataaatcaccgggattggcggcaaagccgtctaaaactactattttcataataagtaataagtaataagtaataagtaataaatattatggggcattcccattattttttagttttacaattgtggctgtcagtaatttaagaatttccagacagtcagtattaatagattcatattgttcatcgcttatatattctgtttgctgaagtaaatatagccaatattctgtttcagaacattccttttgagaaatagagtatttgtgtataaagtcaagatgtgattctgcataaatagcttctctaatattagcaccgatagaagttccactacgtaatatctgttttgatagaattgtttctttcttgcaatctcttaaatacttatatagattaattattcgaattgcaaatttggtagacttctcttttaataaattttctttcacggctacggctaatacctaatacttaatacctaatacttatttaaacctttctccccataactgctgcatccgttctgcatgcttctgttcggcggcattgttctgaggttgccatattcgtttttctttcagctcgtccggcaagaattgttgcttcacgaagttgccttcgtagctgtgggcgtacttgtattcttgtccatatcccagttgcttcatcagcttggtgggagcattgcgtaaatgcagaggtacaggcaagtttccggtggaacgtaccagctctaatgcatcgttaatggcactgtatgccgaattgcttttaggactcgttgccagatagatcgttgtttccgccaaagggatgcgcccttcgggccaaccgattttcatcagagtttcaaagcaggcattcgccagcagcaatgcgttcggattggccagacctatatcttcggcggcagagataacgagtctccgcgcgatgaaagcagggtcttcaccaccttctaccatgcgggcgagccagtaaatagccccgtccggatcactgccacggatagacttgataaaagcggaaatgatgtcataatgcatttccccgtccttgtcgtaagccaacggattctgttgcagacgttcggtcaccatgtcatcggtgatgacaaccgtttcctctgtgtccgattccactacaagttcaagtatattgagcagtttacgggcgtctccgccggagaagcgcagcatggctgtcgtttctttgagttcgattttccgttctttcagtatggtgtcggtggtgatggcacgttgcagaagttcgagcaaatcttccttttccaaagatttgagcacataaagctggcaacgggagaggagagggcggatcacttcgaatgatggattctcggtcgttgcgcctatcagcgtcaccgtaccgttttccacagctcccaacaaagaatcctgttgcgacttgctgaaacgatggatttcatcgataaacaagatcggactggattgcgagaaaaagcggttgctcttggcacgctctatcacttcgcgcacatctttgacgcctgaagtcacggcactcagcgtataaaacggagtttccagtttattggcgataatctgtgccaatgtggtttttcccactccgggaggtccccagaggataaacgaagaaatacgtcctgcatcaatcatcttgcgcaggatagcccccggtccaactaaatgtttctgaccgatataatcatccaatgtctttggtcgtaaccgttctgctaaaggttgcatagtcttagaataccattaataccatgaaacgaataccgttcttgttgatacccggattgtcacggtaggtgaaacgatgtacatattcaacgtgcagcaacttgaaaatgttgtagatacctatacttccttcgatatacggcaccttcgggtccatcacgaaactggtgaatttaccgtcgcgtgtcgggaaacggaagaggtcggggttgctgctcttgaatggattgtttttgtcggtcaatgtcccccacaatgcgcggatacggaacatttctctccatttcagattcttgatcagcgggatgcggttgaacaactttccgttcatgtcataagaaagtgacatggacgcataacggtcgttcaggaattccatattgttgatcagggaaaatgtctcacgttgagtgatatatgacaagttggcttccggcagaatcaatagcgggaaaggtacgacattccattctgcccctgcttttacgctacagtctatctttccccacgaagcgggaagccagaaacgtttccagatgcttgcttccgtgcggttgaagttgtattctccgcccagcacgcctttgaagcccatggcatgagtcagcgtgaagataggagcgtccagcgacaccggaacacggcgctgcttggagttgacgaaagattctcccggagcataacgcagtgtcacactcgcttcggaagtcgtgatgtcatgcacacgggtttgtgcagcgtcattccgcagatattccagttttccggtaggctcgtcatttcgatggcggagcatggctttcactccgaatcccgtcagcgtttcgagttcgtagttgatggtagcatcacgcatatatgacatctggtctaccgttgtcgttttcatcgaaaggaagatgttgtctttgtccgtaaacaggaacttgtccatcggcgacattacatcataactgtacgttgcagatataaaatgtttgggaaactcccatactacataatctcgtttgttgaaagaataagtcagcgttccgctatatttccacttttcgtctttcagaccataagctccgtatccgctcaggaaccaatgcttgtcaaaatgggcagtagtcataccactcaggcggaaacgggttccgtcgatgtagttgcttgaaatcatggtgttgataggaccgatatccactttgctcttatgctctttgctgcctgtttccacaaagttctcgatcaatgctttcgcaccgaagatgatatatttgaatcccggaatctgttccagacggttgacgaatacatccatattgctttcctttctggtcaacggcacctggcgtacactcgcccagtattcgtcactcttcgaaagcatgtcggcctccttgatcacaggacctttcaaacggaacaaccgctgttctatcggatcaaacttataattgctgtatttagtcgttcgttctacctgtaaccctcccgaggttttgttggaactccatgaaaggtctaccgtcatgtcgtcatccgccaatacccagttcccgttgggaagctgctcgtactgctgcacgatgtccatgcggttgacaaagttgacaccactctttttaggcaggttcatcgtacacttctgaacggcataggtcgaatctttcagcacataaagatggcctgtaaatccgaaatcctgtgagttctgcggtacgaacgtcagatgtacgcattcgcgcttgttcaccatcagcgtatccatcaggtagtatttatagaatgagatggcattgttgccgatagggcttacgaagcgttgttggagcagccggatgtcatcatcatagatgttgatatcggcaaaaacatccttcagaacagtccccagcatgtctcctgtggagaaaaactcttcgataccgttggagttctttcctttgatgatggtctttttgctttcggggtctttccggaaaatggtctgtgaggccgtttcctgtacggagatagggagaatcagtttgttggtcgtctccgacacttccacctgatctttgaggaatgagtatttcttgtagatacccttttccagtttctccggagtcaggtcgttgatcgacattttcattttctcgtacttgtcgtactggtagtaatcgttcacttcgagcacttgtgcttttttgtgttcgatcactttcttcatgaattcgactgccggattattcttgcgggagtatttttctttctgtggttttacgactacttcggtgagcattacatcgtccggagagagtttaacattgacggtctgatttccggagcctactttgacggttttggtgacatatccgatggaagagaaaacgagcgttcctccgtttctccgcgcgtcgagcttatattctccgtcaatattggtgacagtacccatatctctcttgtcttggtagtagacagagatatacattagtggttcatgagtgactgaatcagttacaaccccctttatttgctgcgcaaaagcatttgaaactgcaaatacgactaagagcagtatcagtattttgttatatcgttgtatcataacgttcgtagtagggctgcaaagttaacaaataagtctgagtaaaatagagtatataactttttttacccatcgttttttgttatttacaagcttatatcattcaacaatggaaggaggcagattgtttttgtctttttatacttcccttttcaacgtatgccacatcttgcgaaccggcatgctccgattcttttccgtagttccaaaatctgtttcaacggttgaaacaaaaagtttcatgccttgaaactctagttcccactgcttgaaactctggtttctacgccttgaaactttggtttcctcggcgtgaaactttctgaaacacttgtcgaacctgatagtggtcggctacttctgtctggctattaagccggctcgttgatcatcgagtccggctcaaccactccggttatttacttgttaatatttgtacgattcgttcggctgttcgtccgtcccagcgttcggggagttcgcctttcttccattcacctttcatcagcgtatccatagcctgagcgagtgctgccggatcttcgccgaccagttcattcgttcccacgcgccacgtttccggatgttcggcatacgtgttgagcgtgatacaggggatgccgaggaacgtagcttcttcggctacattgccggagtccgtgatgattcctttggctttattgatcagatatccgaagaaaagataattctgcggaggcatgatatgaaggttcgaggcttctatgccgaggtctttgatcgcattgcgcacgtaagtgtgcatgggcgctacgataggcataccggcagctttttcgatcatcgtttgcatcaacttccgcaggttctctttgttgttgagcagtacacgtcggttgagggtgagcaggagataattgccctcctgaagtcccagcacggagaaccataccggtttgagcagccggttccggttgaaacgaacggtatctaccaaaatgttgccgacgtaatatacgttttcgctttccgtgcctgtctgattcagatttcggttggccaccatgccggcggtaaacagataatcggatactccgtcggtaatcatccggtttacttccttcggcatcttcatgtcgaaggaacgtgtgccggctaccagatgggctaccttgattccttgtttcttggctacgatggcgcaactcatggttgctgtcagatcatccactaccaggacgacgtgtgccggattttccgtcagctcctgttcgaaggcgatcatgattccggctgccagactggtggggttactgctttccactccaaggtagacatcgggagctttcatgtcgagatccgaaaacagggaagcatccagacttgtatcgtcccgtctgcctgtgtacaccaaacggtaggagatgcttttacccagccctcttgcggcttcgatggcgcgtgtgataggggctattttcatgaaattggggcgtgccccggcaacaattgttattttcatattgtttctatctaattcgtgtagcaaaagtacattttcttacggaatttattcgttactttgcatacaaaataacaaatatatgccgacattcgttcaaattcttgattttataggcacatttgcctttgctattagtggtatccggctggcttcggcaaagcgtttcgactggttcggagcctatgtcgtaggtcttgctaccgctatcggtggcggtaccatccgtgatgtactgctggatgtgacgcccggatggatgacgaaccctatctatttgatctgtacgggacttgccttgatctgggtgatctgtttcggtcgctggctgatccgtctgaataataccttttttatattcgataccatcggactggctttgtttacggtggtcggtgtggggaaaagtatcgctttgggctatcctttttgggtagccatcatcatgggtagtatcacaggtgccgcaggaggtgtgattcgtgatgtctttatcaatgagatccccttgattttccgaaaagaaatctatgcgatggcgtgtgtagtaggcggcatcgcttactggctgtgcgatgccgcagggatggaatcttatgtctgtcagctcgttggcggatcggtggtatttgttacacgcatccttgccgtgaaataccacatttgccttcctatattaaaaggtagtgaagagactgacggcaattcttgaagattttacttcttgtccagatccacttctccccggtagctgattgcctgacggttctgcatcgtgacatcgatgctggtggtgccgtcggggaacactttcgccctgaactcaaagaagtcttccggacttcgggcggagaatttgataacggcgtttcccttcttatccatatccatcgtgtattctttgaggggagcgttgaatatcagcccgcttcctccgccgtaaggaacgctgtaagcacgtccgtaataagggaggtaagagaataccgaatcatttctgatttgcagtgagtattgtgaagtcagaggtatagaacgtccgcgcatgggcatagcagtgttgacgtctatcttgtagtcttctgatacgatcagctgtctgacagcttctttcttctgttccttcttctccttcttggtctgtgccgaaagagtcgggattcctgctagcataaccagcagtagcataaggatttgttttcttgttttcatatcagttacagtttagtgtatatatgtataacactcaaatatactaaaaataaggagtccccctgctttctttaatgaaaattaaacagaaatccttagaactgttccagaatggagattcgtttctcgatagggggatgcgtggcaaagaggccgctaagtccgctgagggcacttttcgactggtcgcccggattctgaatgaataattgcgccacatccccacgttttaccgcttctatatccggatcatcggaaattttgcgcagggcacttgccaatgccaacggattctttgtcatctccgccgaaccggcatctgccatatattcgcgcttccgtgaaatggcgaagcgcatcagactggcaaagaagtaaccgacagcggctattactaaggcaatcagtatgatgaggatagctcctccaccgttttttccgttgctacgtatgcgcgtgtgcgtaatagtatagaaagtgatttgcgtcagcatcgagaagattccgacaaatacaatcgagacgatcagcaggcgcacatccctgttgcggatgtgagtcagttcgtgggcgatgactgcttccagttcttcgtcgttcaacttctgaataatccctttcgagagagtgaccgtataggtgcggtcgttgataccgctggcaaaagcgttcaatgaatcgtcgtcgatgatattgattttcggagccttcattccgtttgccatgcagaggttctcgaccagattgtagacacgtttgttttctctgcggtcgagaggtttggcacctgtggcggctttgatgatactcgtattcgcccagaaagctatcaggaaccaaatcaatacgacacccatcgtataggggagggcattgatgaaaagaggattagccaattccaggatacttacttccatgctttcaccgtgccccatagcagccagcagatagcaggccagataaagcaatgctgctaccaggcagggaaatagaaataacagaagaacagagcgccgattgttccggctctgctgtgtttggattccgacgtactgcatacgtgctcgtttttagaaactgatcttcggggcctgttccagattcgcacgttcgttggtacctaggtcgaacatgatttctctgcggaaacctgccatacctgctatgatattggacgggaatgtctgaaccgcattattatattccttcgtagccgagttaaagtaacggcgtacagcagccaatttattctctacatcggatacttcttcttgcagttgcaggaaattctggtttgctttcaggtccggataagcctccaacgtgattttcaatcccgataaagcggaagataattgattctcagctgctatcttctcgtcgattgtcttggcgctgactgcaccgttacgtgcttgaatcacccgttcgagggtatctttttcgtgtgcggcatatcctttcacggtatccaccagttgcggaataaggtcgtggcgctgtttcagctgcacgtcgatgtctgcaaaagcattttcacggttatttctcagtctcaccaatgagttgtacatggaagcaaaaatgattcccaacagtacgattattcctacgataataagtatagtcatgtcctttactttaagttaataatactacccaaaagtaagttattttgtattgccaaacaagaagaagagaataaaaaacgtcctaaaccacctaaaaactatcaaaaagcacctaaaatctatcatttgacagtttcaccccctaagaaatgacgaatttccccctgtttgactcataaaatacctttaaacttgcaaacgtcaagaaagaaacgaaatattaaccgtaaaacccttaaagtatgaaaagtttaagtttcagaaaagatttaattggagttcaggaagagttgcttcgttttgcttataaattaactgccaatcgtgaagaagcaaatgatttattgcaagaaacatcattaaaggccttggataacgaggaaaaatatgttcccgatacaaattttaaaggatggatgtacacaatcatgcgtaacatctttattaataactaccgtaaaatcgtacgtgaccagacattcgtagatcagaccgacaatctgtatcatttgaatctcccccaagactcaggatttgaaagtacggaaggcgcttatgacttaaaagagatgcaccgcatcgtcaacgcgctgccgaaggaatataaagtaccattttcaatgcacgtatccggttttaaataccgtgagatcgctgagaagctggacctacccctcggaacggtgaagagccgcatattcttcacacgccaacgtttgcaacaagagttgaaagattttgtataaatagggatagcacattagtcaaacaattaattctggtaaggagcaacgggtaaaaactcgcttgctcctttgattttgtgacaatatgatattaaacatgtctttataccccaacttattctctctgtatttgttattatgtcagagaactcagtatatttgtatcaactagttaacctaagtaatataaatctcatctatttacggcaatgaaaaaggaaatcaaattcagtctcgtttatcgggatatgtggcagtcgtccggcaagtatcaaccgcgtgccgatcagttagtaagaattgctccgttaattatcgaaatgggttgtttctcccgtgtagaaaccaacggaggcgcgttcgaacaagtcaacctactgtatggcgagaacccgaacaaagccgtccgggctttcacgaaacctttccacgaagccggcatacaaactcatatgctcgaccgtggtctgaatggtcttcgaatgtatcccgttccggcagatgtgcgccggttaatgtataaagtaaaacatgcgcagggagtggacatcacccgtatcttttgcggcttgaatgaagtcagaaatattattccttccattcattatgcccttgaagcggggatgattccgcaggcaacgttatgtattacgttctcgcccgtacataccgtagaatattataccgctatcgccgagcgtctgatagaggccggagcaccggaaatctgtctgaaagatatggcaggtgtcggtcgccccgaaatgctgggacgtctgacgaaagcaatcaaggaacggcatcccgaaatcatcatccagtatcacggacatagcggaccgggactttcgatggcttctatcctcgaagtttgtgagaatggcgcggatattattgatgttgcaatggagccgatttcgtgggggaaagttcatccggacgttatctctgtgcaggctatgctgaaagacgcgggatttcaggtaccggagattaatatgaaagcctacatgaaagcccgtgccatgacacaggagttcattgacgattttctgggttattttatggcccctaccaacaagcatatgtcttctttgctcttgaaatgcggacttcccggaggtatgatgggttctatgatggccgatctgaaaggagtgcattccggcatcaatctgatattgagaggtaagaacgaaccggaactgagcatcgacgatttgctcgtgatgctgtttgacgaagtggaatatgtgtggccgaaactcggctatcctccattagtgactccgttcagccaatatgtgaagaacgtggcattgatgaatgtgatgtctctgatcaagggagaggagcgttggacgatgatcgacaaccatacctgggatatgattctaggtaagagtggtcgtttgcccggtgcacttgctccggagattatcgcattggcaaaagaaaaaggatacgaatttacggacgaagacccgcagaagaactatccggatcaactggacgagtatcgtaaggaaatgacagaaaacagctgggatttcggacaggatgatgaagaacttttcgaactggcaatgcacgaccgccaatatcgggattataaatcgggtattgccaagaaacgtttcgaagatgatttgcagcgtgccaaagatgccgcattggcaaaacagggattctccgaagaagaagtgaaacggatgaaacgtgccaaagccgaaccggtgacggcaatggagaaagggcagatcatttgggagatcgatgtggaatcgccttctatgccgcccgaagtgggacataaatatggtccggacgatgtgttttgctatattgctactccttggcatacatatgataaggtgttggcgaattttagcggtcgtgtgatcgaggtatgtgccaagcagggagcattggtagataaaggcgaaccattggcgtatatcgagaggtgtgaggaaccggcatagtctgtatctcaaataataacagaaaaaagtaatccctttatccttgtcttgtttcttgatgaaatagactgtgataaagggattgctttatttctttttcttcttcctggtgtctttcttatcgaccgcctttttttctacaggcggaaacttaggaaccagattcattaatcgcaatatctgtttttgtcgtttcaataggtaagccgaaggctttgcagagttaaaccgtatcgggttagggagcgtagcggcaatcagtgcgcactgtcctgagctcaacttggcagctgttgtgttgaatttatactttgcggcagcctgtgcgccataaatcccttttcccatttcgatggagttgagatatacctccataatccgttctttcgaccagaacaactctatcagaaaggtgaaataaacttcgaaacctttgcgtatccaagacgattgcggccataggaacacattcttggctgtctgctgactgatggtacttgctccgcgcttccgtttccgtttttcgttctccttcatcgctttctctatctcgatgaagtcgaatccgttgtgttcggcaaagcggttgtcttcggaggcgatgaccgccatcggcaggtgaggagatattttatcaaaagaaacccacgtgtgtttccacgtgggtttatctcctgacgcaagctgctgtacacttcggatgaccatcagcggagtgacatacaccggcataaagcggtagacaatcacagccagaatggtagatgcaaagaagaaaatcagcaggttgcgcgcataacgcaatatttttttaattggaagcggcctgtgcatctttaatcatctgctcacttgcgtacatgtaaacttctacacgacgattctgttctcttccggcagctgtgtcgttgctggcgataggatcgctttcgcccattccctgcacacctttaatctggttggaagaaacgccgcagtttaacaggtagctggctacactctgtgcacgttcctgtgacaagttcagatttttctgacggctttgttcggcagtactgtttctccagccctgattgtcggtatatccgtagatggatacgtccatgtctctgttctggttgagtacgttgttggcgaacttgctcaatgcagacttggcagcagcactcagagttgcattaccggtagtgaaaagaatacctgaatcgaatgtaacttttactgcctgcaatccgttgttgtcagttatctgctctacttgtgcgccttcaatttgttttgcttctgctgccgctttatccatcttctttccgataagggcacctgttcctgcacctactgcagtaccgatagccgcaccgatggcagcacccttgcctttaccgataacaccgccgaggatagcacccaatgcagcacccgaaccaccgccgattgcggcacctttgcccgtattgttcatgcttgcgcagccactgaatatcatggttatactcatgaagagaaccatccatttcatcttgttcataatgcaatgtttttttaataggtttataaaataatactttaataaattaacaacgcaaagatacatattatttgccaaggtcatactttttaagttaaaataactccggacgatctttgtatatgtaaaataacaaacgacactactaccttgttgacacggaaggcagatttaagcattttttcctgatcatggtgaaccatcccaagagaatcagtcctttggcaatcgttgtgacgcatactgcccaccagataccttctactcccatgcccatccgtacaaacaggatggcaagcggaatgcgcatatagttgcatacaatgctgacaatggcaggaggcacggtacgcccgatgccgtagaacactccctgcatcgtgatttcgagcatcataaacagctgcgaatatccgtcgatacgcagaaatacacctccggcttcgtaagctgcctgttcggggacaaagatcgaaaagacctcattgccgtaaaagacaaacagcagcgtgcagaaagttccgaagattcccgtcatccatagggtggtgtgccaggctttcagtacccgttctattcgtccggcggcgaagttctgggcaataaaggcgctaagtgcggtggagaaaccttgggaggtattccaggtgatggcttctatctgaccgccggtggtgaaagtcatcagtccgatgtgtccgccctgttcggatgcggtacggcagaggaacatattgacgaaggcgaacagggtgtttagggtagctacaggcagacctagtttcagaatacgccgtgtgtacttcttcttcagtcgggagaagaaggggaaaccgccgagcagggcgtctttgcggaaacgcagctgatagatgaagatggcgaaaaccgttgcctgcgagagccatgtagcgtaggcggcaccgtttgttcccagtccgaagccgaagataaacagagggtcgagaatgatattcataatcagtcccgtcccactgatgtaaaatggaattttgcttcgtcccgctgcattatagatacctgtgaaggcagcagacaggaatatgaacggcaatgcggtggaaataatccgcaggtattcgatggcattggctgtgatgtgctcttctagttcatagatgcggatgatggggcttgcgaacatgaaaagcagtccgccccagcagatcgaaatgatcagagcaatcgtgatattgtgtgaagcgaactggcgggcatcttcctgattctgcgcaccgatggattggcctacgctgacttcggaccctaccttatttaataaggagatagaaccggacatccacgtcaggattcctaccgaaccgatggcggctacagcctcactgcccaatcgtcctacccatgccatgtctgtaaggctgtatgccatctgtataaacgacgttgccatgataggcatcgccagattgaaaagttggcggttgatagggccgtgtgtcagattcttaattccttgcatatcattttttctatttaaaaggaggcgcaaagatacataaaattactatcttcgcacatcaaatattcattaatcaaagtatacagatactatgaaacagaaattctcttctctttttgtattgctggtcctgctattgacaggtctgcaagtctcggcacaaagtacgccaaaaccatttgatattgaacagccttctcttcgtgttttcctgccggcaccggaactggcgacaggtcgtgctgtggtagcctgtccgggtggaggatactccggtctggcggtcaatcacgaagggtatgattgggcgccgtatttcaacaaacaaggaattgcattgattgttctcaaataccggatgccgaaaggcgaccgcaccctcccgatctccgatgccgaagcagccatgaaaatggtacgtgacagcgctgacgtatggaatctgaatccgaatgatattggtatcatgggatcttctgccggaggccatctggcttcgaccatcgctacacatgcgcctgaagcacttcgtcccaacttccagattctcttttatccggtgatcacgatggacaaatctttcacccacatgggctctcatgacaatctgttgggtaaggacgcttctgccgatttggaaaaagaattctccaacgagaagcaagtgaccaaagagactccccgtgctttcattgtttatagcgatgatgacaaggtagttcctcctgccaacggagtcaactattatctggctttaaataagaaaggtgttccttccgttctccatatttatcctacaggcggacacggttggggaatccgtgaagatttcctctacaagagtgaaatgcagaacgaactgacttcttggttgcgtagtttcaaggctcctcgcaaagatgccgtccgtgtggcttgcatcggcaacagtattacgttcggagcaggaataaagaatcgcagccgtgacagctatccttccgtactggcccgtatgttgggcgacaattactgggtgaaaaatttcggagtgagcgcccgtaccatgttgaacaaaggagatcatccttatatgaacgaacctgcttataagaatgcgttagcttttaatcctaacatcgtcgttatcaaactcggaacaaacgacagcaaatcattcaactggaaatacaaagcagacttcatgaaagatgcgcagaacatgatcaacgctttcaagggccttccttcacagccgaagatttatctctgctatccttccaaagcttatcttacaggtgacggcatcaacgatgatattatctctaaagaaatcattccgatgatcaagaagctcgccaagaaaaacgacctgtctgttatagacctccatactgcgatggacggaatgcccgaactctttccggaccgtattcatccgaacgaaaagggagcgcaggtaatggcaaaagctgtctatcaatctatctctgctttaaaataaaaaatatgttaccgatcattgagcttttaaccggataattgtattgataatatagcccctgataaaagaaaggagaatattatgattagaacagttgctgtctttgtttttgtgtctttagcttgtgttgctactgccttttctcaaactatagaaaaggggaataaaatggatgtgcaaaagaaaaatagctctgcggaagtaagcggacaccagttgcccgaagcaaaaatcatagaaccgaagttaccggatatagaggctaaaaaacttgcaacagatgataagtccatgcagacatacggtctgacaccttcaagtcctgcatcgggcttatctccctatttttacgattttcctgcattgctggaaagtaatccggcattgacggatttttataattttcgtcagcattctatgaatggacagttttcttttattgggagtgcagaacaaaagacttatctgggattggggcaatatgtagcggtaaatgccggaatgcgctggattccttctcaaagatttttcgttgaagcgggaggaaccttaagccggcaattctatttggctttgcctatagcgagacaagacatagcaggaatatatacgagaattcattattctttagccagaaatgtccggttaaatgtctggggacaatattttatggggggaaatacaccccctccggtttacaatccgttatttccacatacaggggtaggagcttctatctcggtcgatgtgaaaaagaatacggaagtaagtgtcggtgcggaataccagtatgacaagaattcaagggaatggaaaatggaaacgtcaggccgtgtatccattggcttttgacacatatttcatcattcatttggttctgttatttatttcccatatctttgacgcattaaaattataatgtttcattaaaactagtggatgtttaactcatcatttattacatcggatttggtctgataagaatctgttcactttaacagattcgaactttcatactttcggataatctttccggaagtgattctcctatattatataactttagtttttatacccgcatacaatagcaaaagcattgttgtgctttcacgtgtatgctatatacattaagataatgagtaacgaaaataataatctgtcattatatggttggagtgataatctattccggcaaaaacaaatctcacaatttaaagatatgtctcatggacgaatcatcgtgacacataaaacctgttatgaagtagttgcagaggatggcgtatatttgtgtgagttaacaggaaatatgatttatggcagaatgcctgatgaatacccttgtacgggcgattgggtgatttttcagccatttgatgcaaataaagggattatagttgatacgttgcctcgtgaacgggcgttgtatcgcaagaagaacggaacggtagccgaccggcaggccattgcttcttacgtcgataaagcatttattgtgcaaagccttgatgataatttcaatgttcgcagagcggaacgtttcatagcccagataatggaagaaaatatcaaaccagtattggtgctcaataaagccgatttaggttgtgacaggcagaaaatagatgaagcgatcaaacacattgcccgtcagtttcctgtatttatcacaagtatttgtcaacctcaaacgattctccggttgcgggaatccataacaaaaggcgaaacggtcgtgtttgtcggctcttcgggtgtcggcaagagttcactggtgaataccctttgcgggaaatcggtactgaatacttccgatataagcctgtctacagggaagggacggcatacttcgactcgtcgggaaatggtattggtggatggctcaggtgttttaatcgacactccgggtgttcgggaatttggtttggcgattgacaatcccgattcgcttgccgaaatgtttgaaatatccgactatgcggaatcatgccgtttcagcgattgtaagcatatcgacgagccgggttgtgctgttttagaagcggtacataatggtacgttagatcataaggtatatgagagttatctgaaactcaaacgagaagcatggcatttctccgcttccgaacatgaaaaacgtaagaaggagaaatcctttacgaaactcgtagaagaagtgaagaaacgcaaggctaatttctaaagaactattgaagcagggaatgccggtactttatcagacaaggtgatactgtatgacggcttctctgcttcttattgtttggtaagagtttacggcaactattctcttgcttttagagtaaaggcatttcaactcttgtgacatgttcctcttcgggtacatccggattgctgtaataatattctattgatgttcccgaagccttatatccatttgtttttatccattcggtcatctcattgtacagctgtgccagttcattgtaatttcctctatgcagacatacgactattcttctggcggggaggatgacagactgtattttttcgtcaccctgtaaaggtttcgaagatttcagtccgataatcatttctatacgatcttcggtcaggctttcaaagtcggggtattctacgaaggggatatccgtggttacttctccctgtttcttgaataaagagtctattcttacaaaattttctccgatagcctgtgacatacctttcatgttggtttgtacttcaatagccaaagcaggctgttccggctgctgtaaaagcatgatttctgatatctttgccatagattctgttttaatggtgattatttccgtatgaccggtatatatatttctgttagtaattccgacgtttccgtggtggacggatgattcatatacatctcaaagctgaatgtgctttggggatggtatttacttttcggaaaccattcctcataaatgctcctgtacactttgtgtaaagaagaatagctccccgtatgtctgaacacggcatatcgccctccgggaatttgcatgattcccggtaccggtctcgctttagtatcatcgcgaagggtgatgcccagatagaaccggcacttctccgtaggcgtaatcgacggatcgtccatgctaaggctgataaacttgtcatatcgtgggtctgcttcatactgttcggcatgatgcagtagtttattccaaagtaatctgtattttagtttgtttttatacgcttcacccacttcgatgcagaatatctttatcgggctgatcacttttatctccggttttatgtttgttgccggattttcaccgttcggtctgtgcttctctctgtattgagaagttgatataccaaaatgtttcttaaaagctttggcgatactgtatttagtctgataactcgtttgctctatgatttgctttagcgtatagtccgtagagatcagcagatgtgcaacgtgttccatgcgcaaacgctgtatgtaactgccgatattctctccggtagcggtgcggaacactcttctgaaatgaaatttggacagtccgctcatcgaactcagcgtgtcggtatccagtacctccgtcagatgaccgttgatgtacactattatgttctgaatcatcttatgatgaaggctgcttgtctcttgcttttgccgccatctgttcagtgtgggaaggcgtttgtccagtatctccctcagctctttcggagaatagtccgtgtctgcgtattcattatatttatctgtatattttatccagatgtcgatcatttcccacatggatatatcgacaatgtatttcccatccttcaggcagtaataacaaaactcatcactcctcgaaccgtcggagttggtgcctaaatattcctccacgtcgaagcggagcggcattccgcagctttggcaatatcttttatttatttctgattcaaccatttgactaatcttgcattctttgcaaaaataagctattttttcagtaaacagttgtccggaatagccatctttttattaacaaatgttcatttccgctatttcttaaagttgtatctttgctgcgcttttataatatataaggtaaagatggaaacaataactggaaaaagaagtttatcattctatgagccgattgtttggtgtaggtctgtttgtcatcaattcgatattggatatgttttgggctttatgtagagtcttatatttatgttctgtgtatattaataaaaaaacctctgataatcaatgattatcagaggtttttttactccgtgatccagctggggctcgaacccaggaccccaacattaaaagtgttgtgctctacctgctgagctactgaatcaatcctttatgctttctttcgaattgcgggtgcaaaggtagaacatttttttagaactccaaagcatttcaaacatttttcttatctttgtgccattatcaacaatatacaatcattaatatatggctgacgataaaaaaatcatcttctcaatggtgggagtgagcaaagctttccaaccaaataaaaatgtactgaaagacatttacctgtcgttcttctatggagcgaagattggtattatcggtctgaacggttccggtaaatctaccttattgaagattatcgcgggtctggagaaatcctatcagggagaagtggtcttctctccgggatattctgtgggctatttggcacaagaaccttatctggacgacacaaagacagtaaaagaagtagtaatggaaggtgtgcaaccgatcgttgacgcactggcagaatacgaagaaatcaatcagaaattcggtttgcccgagtattatgaagatcaggacaagatggatatacttttcgcccgtcagggagaattgcaagatatcatcgacgcaactgatgcatggaatctggacagtaaactggaacgtgcgatggatgcgctccgttgtccgcccgaagatcagccggtggtgaatctctccggaggtgaacgccgtcgtgtcgctctttgccgtttgttgttgcagaaaccggacatcctgttgctcgatgagcctaccaaccacttggatgctgaatctatcgactggctggaacaacatttgcagcaatacgaaggtacagttatcgccgtaactcacgaccgttacttccttgatcacgttgccggatggattctcgaactcgaccgtggcgaaggtatcccttggaagggaaactactcatcctggctggaacagaagaccaaacggatggaaatggaagaaaagaccgccagcaagcgtcgtaaaacactggaacgtgagttggaatgggtgcgcatggctccgaaagctcgtcaggcgaaaggaaaagcccgtcttaattcatacgacaagttgctgaatgaagacttgaaggagaaagaagagaagctggaaatctttatcccgaatggtccccgtctgggtaataaggtaatcgaggcaaaacacgtagcgaaggcatacggcgacaaactgctgttcgatgatctgaactttatgcttcctcctaacggtattgtcggtgtcatcggtcctaacggtgcaggaaaaacaactcttttccgtctgattatgggattggaaacggtagataaaggtgagtttgaagtaggagagaccgtaaaggtatcctatgtagaccagcagcataaagacattgacccgaacaagagcgtctatcaggtaatctccggtggtaatgatttgatccgtatgggtggacgtgatatcaatgcacgtgcgtacctgtcccgtttcaactttgccggtgccgatcaggaaaaactttgtggtgttctttccggtggtgaaagaaaccgtctgcatctggcgatcgctctgaaagaagaaggtaacgttctgctgctcgatgagccgaccaatgacattgacgtgaacacccttcgtgctttggaggaaggtttggaagactttgcagggtgtgcggtagtcatctctcacgatcgttggttccttgatcgtatctgtacgcatatcctcgcttttgaaggagactctaatgtattctactttgaaggttcctattcagaatatgaggaaaacaaattgaagcgtctaggcaatgaagagccgaagcgtgttcgttatagaaacctaatgactgactagtatttgctgacagattacaagttaaatctcacttaatatacgaaagtgaaaggctctgcaaacattgcagggcctttattgttttcgaaagcaataaaatgtttatctctcttaaaagaatgtagcataattgtcatctaagtctaaataatattaattatctttgtgcacagtttcaatgaaacaaacaattagtattaactaataaattacattatgttgaagagaatgcggtcttttttagtggtcgtaatgttactgattactgctacgatgagtgcgcaagttaccacagcaagtatgagtggtaaagtaacagcacaagatgaacctattattggagcaacgatcgttgctattcacgagccctccggtacccgctatggtacagtgaccaatgtcagtgggcaattcaatctgcaaggtatgcgtacaggcggtccttacaaagtcgaaatcacctatgtcggctatcagtcagccatttacaagggcatccagttgtcattaggagaaaactacgtattgaatgtttctttgaaagaaagttcagagttgttggatgaagtagtagtaacagcaccaaaaactatcgaaaaaataggtactgttactaatgtaagtgaacgtcagatgaacactttacctactattaacagaagtataacagatttcacaaagctctctccttatgcaggtggaagcagttcttttgcggggcgtgatggacgttataacaatataacgattgatggtgcttcgtttaataatagtttcggattaagttctaataatttacctggaggagattctcaacccatatctttagatgcaatcgatgagattactgtaaatgtctctccttacgatgttaaatattccaacttcacaggtgcttctattaatgctgtaacaaaaagtggaacaaactcattttcgggtactgcatatacctatcataaaccaagaggatttgcagggagctctattgacggtgaggatattcttaaagcaaaagaatacaactctcattcatatggtgtaacttttggaggtccaatcattaagaataagcttttcttcttcttgaatgctgaaattgaaaataaggaaactccgggggtaacttggcttcctaatcaagatcaaaatggaacaggggatagcggaaaacgtatctcacgtacttgggtgggtgatatgcgtactatcagtgactttgttaaaactaaatatgattatgaccccggacagtatgagaacttcaataatttccaaagtgataattggaagttaatggctcgtattgattggaatatacatcagaaccataagttgacagtgcgttttaattctgtttcctcagaagatgacagagaagtaagcgctaagtccactattataactagtactaattctaatcgttatggtttggatgccttttcttttggtaattcaaactataagatgaaaaacgtagtaacatcgataacaggcgagttaaatagtcgtttctcgaataatgttcagaataaactgttagccacatatactcatattagtgatacacgcgagcagaaaggctctgattttccttttgtcgatatatataaggacggaaagcaatatataactttaggtacagaagtgtttactcctaataatcaggttatcaataatgtatttagtcttgttgataatgtgagtatatcattaggaaaacatgaattgcttgctggcgtttcttttgaacgccaatattttaaaaactcttatttgagaggcccttacggatattatcgttatgattcaatggatgattttatgcagggaaaagtacctaccatttatggtattacatatgggtataatggtaatgatgctccaggttctgagttgacattcggaatggttggtgtgtatgcccaagacgtatggtctcttactcctaattttcgtttgacatatggcttacgtctggatatgccaatatatatgaattcattggattctaacaagtcaatagaggaattagcttttgtaaataatactcatgtcgatatttctaagtggccgaagacacaagtcttgttttcgccaagagtcggttttaattgggatgtaaaaggtgatcgctccgtaattgtatcaggaggtacaggaatctttactggattgttaccttttgtatggttcactaatcaaccaagtaattcgggcttataccaaaatatggtagagtataatacacaaaaaaatccgggctctttacctgctgactttggttttaatcctaattatagagaaactctgcagaaatatcccagtttatttccttctacaccttcagagcaagcacctgatgttatagcatatgtagatcctaagtttaagatgccgcaagtttggcgtagtaatttgaatgtggatattcaactgccgtatgattttatgttatctgttggagcaatgtatacaagagatatttataatgttgcgcagatcaatatgaatgaggctgagcctacgggtgtgtataatgaacaaccggatcgtatttattgggcttcaaaaaaatacgagtataatgattatactaatggtaagaatgtagtagtaaaactttctaatggagaagataaaggatatcaatattcttttaatgctattttgacaaagaaatacgattttggttttacagggtctatcggctatacttatacaatggctaaagatctgactgcaaatcctgggtcagcacctaattcagcatggcaaaataatgtggcagtaaattcattgaatgatcctggagtatcttattctttattttctacgccccatcgtattattgctaatgcttcttatgaaattaattatgctaaatgcttaaagacaacattctcgttattttattcaggatatcatacaggacgttattcctatacatattataatgatatgaatggtgatggcaattattcggatttaatatacgtgcctaactctcaggatgaaatgacctttgttgatattacagataaaagtggtgctattacttattctgctgtagatcaagctaaagatttttgggattttgtgaacaatgattcttatcttaaagatcgtaagggaaaatatgtggaacgtaatggatctttaacaccttggattaatcgctttgattttaaaattgctcaggatttttatgcaactttaggtgggcgtaaatatggaatacaggttagccttgatatgctgaatgtaggaaatatgattaattcaaaatggggagcatatcaatcttgtggtctcaagagttatgacaatgtacagttattaaaaactgctagcaaagttggtgaacccttgacttaccagataaatgctaattcacgtgaagcttttaaagaaagatcatcatggcaatataccaataccattggtagtgcatggtctatgcaattaggagtaaaagttactttctaatacaagttttaaaattaaaaagaaggattttattttaatgggaagccagttaattcataatgagttaactggcttttttgtagcctttctatatagtgatatacagcgtaaggtttataacctcattctcatcaccaccggattatgatcactatactccaaatccggagagaagtaatccaccccttgaaactcagacgaatggaggatatagtcgattctcagcagatgcttgaaatatcggaaagtgtacatatacccatgtccgcaggtctgaaagccatcattcatcttttctccttttacagtttgatatacatatgaagaagggagagagttgaagtcaccgcataccagggtgggatagggagaatcggaaatcaattgattgatatgttcagcttgtgcggcacgtttcttgaagttctcatgcagaccatcggcaagggtgagagcggcacgttccgcacggtcggtatcgtctgcacgaagttctttttccagtttgcgcttgttgcggctgacttccgtagtctgcagatgattgttgaacagacggattgtttggccgttaatgtcgatatcacaccacaggctgcagttgttggaatttgggtaggtgacgagctgcttctccttgataggataacggctgaacacagccagttgcaaaagactctctccggcaggagaagaaggtacatagtaatacggccattcggaaagaacggtgcgaagactgtcagtaccaaattcatgattgatcccaaactcttgaaaacagaagatatctacaccgagctccttcatgtaagcagcgatttccttgcatgagaaacctgtgtgctcgtgattaaagctgttaacgttataggtggcaatagtcagtgctgattcggtggccctttcgtttttcttcagagattcagtattcggttgggaagccgaatcgaaaagcggggactggaggacacgggtcagataccccaaatttcccagtatggcgattaaaggaatgaaaacccagcatcgccagcgaaccgtccaatagatggcagagacgacattagccagcaaaagcatcggcagaaccaatccgataaagggcatcagcttaaagccgcccggcgaagcatctccggcgaaggctccggctaatgtgaaacctgccagaatgctcgtcagcaggatagacaggtagtaaagtaatctatataaggctttcattttatggtaaccatttattaatcatatccttgagcttcgcttgagagatcggcttggcgatgaagtcgctgcatccggcatccattgcagctatctgatcctgttgataagcataagcactttgtgcgataatgggcacagtatgagaaagctcacgaatgatcttcgtagcctccagaccgtcgagattaggcattttgatatccatcagaataaggtcaggcttcgcttcatcgtatgaggtaacggcctccataccgtcccgtgcacgtataagcctgtactttcttccaagaatagccttcagcaagtcgaagttactgtcctcatcttccgctatcagaatagtccgctggcttggagaggcattggcggaaatactatcggaactattatcgtccgtatttccggaagtcttttcagaatcctccttgacagacgtttctactgacgtctccgtagaagccatgtcaatctttatagaacccgtgccggtcgattgttccgactcgtaaggcagggtgaatgtaaaagtcgtcccttgacctaccaccgaagaaacggagatttcacctcccaatcgttcgacaattgttttacagatagacagtccgagtcccgtcccctgcgcatagttgttcaacttggcgaaacgttcgaacacacgtcctatcttctccggttcgatgcccgtaccggtatcagtcacgtggaaaacgatctgattgcccaccagtttatatccgtaactgatgctgcctgccttcgtgaatttgaatgcgttacctatcagattcgagaacacctggaacacccggttcttgtcagtctctatcaccagtccgttttcggatggctcatagatcagttgtaccccttgcggcgtgcggaatacgtgggcgtcatgcacctctttacacaggctatggatatttaccggtgcgctggtgaactcgataatgcccgattcgatcttcgaaagatcaagaatttcgttgatcagttgcagcagacgttcgttgttggcttcgacgatctcataaaatgttttacgttcttccttattttcactttcggctatcagatgtgagaagccgacgatggcattcagaggtgtgcgtatttcatgactcatgttggcgaggaaagcagacttcagtttgtccgacatttcggctttctctttggatgtctgaagttcccgtttgattttttccagctccgtgatgtcccattcgatgctgacgatgatgggggaggaaagttcgtctccgtccacccgtattttccgtttgtcgaggatgatctcgtttccgtttttgtctttcccttcggttgtccagtgcagtccctgtccggtggtggcaactagtgtatcttcctcccttttcttttctgccacttcgggaggatagtagtcgaagtcattcttgccgatagattcgccgatgcacagattccggttgtacgattcccggttgcggtagatatatcggaaatcgttgttgatctccttgacgacaattccggcggggaggttgtcgatggtagtatccatgatcagattgagccgtttgatttgcgcttcgtagtgcagtcgttcggatatgtcgtgggagaatgaccagtaactttcttcaccggagtcattggtgacgttgtacatgattccctcgtaagccaatatattcttgctgaccttcgaaggatgatgggcgacgaaacttctgcttcctccgtgcaggatatccttgcagcgttcatgccagtctttctgcgtgttcatatcgccggcgatttcatagattttcagtttgccgatctcctcactttccgggatgccgtggttgtggaggaactggcggttggcgaagatcagcgtaccgtcctctttggcggcgaagatgctctcctttgcgttgttgatggcgtgcgtcagcgtgttgatgtcgtttctgcgacgctgtatgtcggtgatgttctggatgtaaccttcgatgttgcagctgccgttcggtagttcgtctcgcagataagcctgaaggcgcatatagtaaatctctccggcgacacggacccgatagctgatactttcttcgttgagtccttcctcatttttccggcaccagttggtgaaactcatgcggtcttcttcgacgataaattcctgatatttctccagagagatacttctggaagattcctcgcacaatactccggtgtagcccatgtaatagaagacattgtcgcgggtgttgtacatccactgtccgatctgagccactttctgtatctccctcagatttcggttcacctgttccagctggcgtttcacgttgcttcgctgggtgatgtcccgatattggcagagcaccatgtcatcgtaaggatacatgatacacttgaaataataggtattatcctccagttccagcttgtagttcttgctgatgcttcgctgttcccgaagcacggtctggaaggtgctgtaaaccttctcacgggtatgctcgggcatacgttcgaatatattttttcctaaaagcctctcttcttgtaaaaaccataaattgctatgaatatcaatatcaatgcaaatgccatttctatcgactaatagcatggtgtcggcggtcaacttcagtattctctgcgcattatctgcctcatgtaatgttctgttcatgcttgtccgattagatttataagattctgtttcatgcaaagatagcaaaatatttgattctctgttcttatttttcggcacgttttgctttttcccaggcgccgcttcctttttttcttttcagatagccgattcctttgagcacattcacgttcatgaataagaaataatagggaataaacagtactttattctttatttgtctggtagagaggtaatatccccagtatcccattccgtagaaaagaatctgtaaccccagcagggtgccataaaacaggggagattcgcccaatagcaaaacgactatattcagtggcaacagcgcaaacagcaggaatggagtgacagaccagcgcaatacccggtgcgacgtgtactgaaaactcaggattccgtaacggaaaggattcagcaacgggagcagacgccagatcgactgtaatcctccggcagcgatgcgcacttttcgtttttcctcttcacccatatctgccgatccgctttcgatggcgtaggcattggtgcagtaggcgatggtgtatcctttcatggcgatgcggagagagaggatgaagtcgtcgagcagcgtatccggttccatcggttcgaagagttcgcggcggacggcaaacagttctccggcagcgcctacagccgagtagaggcggaagtcgagcgctttcagtgtcgattcgtatttccagtagatgccttcgcctccggcggctgctccgtttttcgtctgtacggctatgcgtttttctcctgccacgcagcctactttcgggttttgaaaagccagtacgatttcacggattgcctcgctgttgaccatcgtgttggcgtccgtaaagacgacaagcggggtccggacgagtgtcattcctcgtgtcatggcggctgtctttccctgccgtttcggctggaagtagacggttacttttccgttccagtgggtttggagacggtcgtttgtgccgtcatcgcttccgtccgtcacccagacgatgcggagtttgtccgcagggtagtccagggcgaggctgttctccatcttttcgtccaccacgtcttcttcgttgaaggcggtgatgaagagggttacttccggcagatcactgtccggtggcagcacccgtttcacgggtttcacgaaaagctctttcagcttgacgagggcgtagaggacgataccgtagcccagataggtgtagaacaccatgaacagggcggaccagaagatgatttcgaggatgagggtttcgttcatagctatattctcgtttaatagatgtttgttgatttacttattgaagtcgtttttttagtgcctcttttttagccgattctttcagtatgtttacaaagtagagggcgtctgctttgttggaagcatcggaaggattggcctcatatcgttttacgaaattctcggcgtgttcaaacaggtatttccgacagtcgatattgagcatgataccgtctctgtagtcagcataagatagtccggtcaatgcatcatttccttcgatagaaacaatgtcatacatgctaattcccggcaaattgatagtggtagaaggatagtagaagaacttttctcccggtaaatttactgttaatttgaaagaacttgcgtctatttgtgctatactaatatggctgtttaaacgataatagttatattcataatattcttcctggcttggaaaccataacgaatcatccccatctttaccataattactatttaaccataataaaaagtcgatccaattgttgtccgtaccatgaacacctatgcagattgctttacgttcttctttgggtaattttagcaggtcagtaatctgttgtttaaaatatgctggtgaatcgttaaactcccgttctatcagagatttttgtaaagtttcagacacttgatacggatatagggtaattgctcctgcttgtgcggtcatcgtttgaatttccggacattgaagagcagcagttacgtatgttttatttccattgggttcagcaagaaatttacatccccttcctgtgagtttctctacaataatgttttgggcaatatcaaaatgttccaatatttgtattggatcattagcatcttttgtcattacatcatggagggcaatgcctgttccatagttcaacatctctcgtatgttatcccatataagtccggatttcatataaaaacgataatagtttgcagtaaaccccggcagtacgtttgtttcagcatccatccatttttcttcaggggcaagagtggtagtaatagcaaaccgaacttcatttcctgctccgtctgtacatcccaaagattggttggcggaaataatagtagggggaagatcccctttttgcaaatgtttgatgtcaaaatataattgatgtttcatattctgatcagtgggagttggagtaggataaggtattgaacttgagatcggtttaccgtttattgcagcccacgtacggcaaaaagcagcctgcatgcagtcgtcttgtgttagcatcaacatccatgtcttattgtattttaaatgagggatttcgacattaatatctttggtctgtatttctttttttgtgtggataatgatttctgctgtaacgtttgctgtttctttgtcgaaaggatacatatagacgggagtagaatctgtatctttttcgttattgtcttgtcctgtatttctattctcatcgtatagattcatttttcttatacaggaagtataggtgaaaagacaagctgttactaagatgatatttactatatattttgccatatccataatgattttgatgagaccttatttgatgagattagagtctttatctttgtatgccgtctttttgataaagagtccggtgatttctttcagtgctttgattacccgtatccatatattatcaatcagtgatccttcagaatttagggttccattacttgtaagcactcgtgctttgcgacttgtaataaatacgatttttccatacggtttcatagctaatgctaacgaaccgtcttctccgcggataatatctgtacgaaatccaaaccgacgtcctatttccgtattaaaactgaaagccatacctcgcacacagagttcaggacgctggatggcttgtaagcggaggtatatatcgcgcaggccttcgtagcaccatagtccgaatcgggaatgtctttcgtcaaccataaaactccataaactgaatgtacatgcaaccttcggattcattagatattttacatgcgtttcaatgtaatgcggtggatataaagtatctgcatcaatacaaatatgatattttccttttgcatggtccaatccgcattggcgggcgtatcccggacctttcttcgtttcgttataataggtaactcccaatgattttaatacttcttccgttttatccgttgaattgttgttaacggctattatttcaatggggaaatggcaatgattctcggagagtgaccagatacaacttatcagatgacgttcctcattgtgtgcaatgagtacaaccgataccagtggagaatcgttttgacgttctttgagttgtcttttgactttgcggatactatcgtcagaaatctcatcaaaagatttcccgtatacttccagataagttttataccactttaccatatgttgttctgttatttagaagaataagttaatgattcgaataagtttttccattgtggcatcacattttccggcagaaagcgttttacgttttccctggctttgtgtcccatcttgatgcgtacattttcattctcaatcagatagcagattttgtctgcaagttccttgatattttctttctccactagtagaccgtcttcatggtcttttataatatccgaaggaccatgcggacagtcaaatgagacacagggtataccacatgacattgcttctgccaaaacgagtccaaaaccttcgtatcggcttgataagacaaatatcgaactcatacagtatttttcggctatattcgatacagtgtgatgaagcagacaattattatttagttgtagttcatctattagtttggtgaacttctctttcaggtcgccttctccataaatatgtagtttccagtccggatgtctttgggcgacaatgctccaggcggggattagcatatcaaatcctttttggggcgcatatcgccctacagcaatagcattatgtgacagaatatctgtttgttttccttctacaggagtagaaataggattagggatgatgctgatattagtcagttccggccagtctttagctccttcacttgtaagtataatcactctggacagtttagacaggtttttgacaaatctgtttgcccatcttttctttatcatgttgacaatcgggcttttacgtttcagtgcttctgcgccataggcgtagcggctgacgtgaaactctccgattttcaggctaccgtctttcaatttagtgataaagttcagttcccggcgcatggttgagatagtaatgtccggtttcagttcgttcaatagattcgatagtcgttgtttaaaccgatagtagcggaacggatacttcagcactttacttactatggattgagagtagggcaggtcgaaagatactcctaagtcgatatgctttactttgggggataatggaaagtgtggtgctttacccatttgttcggatgtaatgatggtgatgtcgtatccttcaaaatgttctgcaaaataattggctttgaatgtaactatccgttctattccgccaggtgcctgtagtgagggcaggtaataggctatcttcatgatttaatagattttagcaatgatttgtttccgataaaattctccggcgtcggacacttgttttccgttggcggcttcgtttacatattttcgttccagctttactttccgtttggctcccattcgccaccattcatattctacgtccacgtgccctgcgtcaattgcctgataaccggacttgaataaatcgtaagccagtacagtagccgtaggtcctaaagcaatcaggaagagagcggttttctcgagtttttgcgcttcattcagaatttcttggtagcggtcaaatgcgtcacggggcggacaaagaatacgtctgatgctttttacattgtcaaagaggtcgttgcctactcccaaacggcttttttcgccttcaatgaatacgacatccctgtctttccagatagctttcatttggtgaaaccaccgtgggcagtcttctttggaagcgaagtccatgtagggacgggtgatgaatgtattgtagtatagcctgtcgggcaacagcaagcggtcccaccagctgccatacagaaagaagtgagttctccagaatcggcgtgctttgcggttatagcgataaatgttttcgaaagtatcggagatacaaaccaaatgtccttcttcatggcttgtcaatacttccttgagacgctgagccaagagtacatttcctttttggaatcctatttccttgtccgggttggtaagcagcatctcaccatcgccgaaacggctcacggaacattggtcttctatgattatccgaatggtctcatcaatggaagctacctgcggagttattttctgatggcatctgagagccatgtaccagaaattgtaccattctacagtaatgccataacgcaatttatagcggatagcattgatcagtggctgtatattcatagtgatatagttttattcaaaggtttcattaataacaatttgcatctgggctttccatgaaagtgattgctctatagacatccgtatttggagcggcgttgttttcaatgattgataaaagcgaattactttttcgatgtcaaggggcgaatcgtccggtgctgccttaagtatgtatggttgatgctcaaagtcatcatccgtttctgaataaacaaaaggaatgcctcttgctgcatattcacggttttttaaggtcttaattttgtcaataccgctacgatggcgagccagactgcctattcccatgtccgactgctcgaacacggcatccagttctttgccgtataaggcactatgaaagatgatatatttctctaactgatgtttggctacatcttttttatagctgtccaccagttcgggaaccccgaagcctacgatattgagatatactttataatcatgagtgtcggtatgtgtacgatagtaatttgccatgccggctataactctgtcgaaaccatgccatgggtgcattgtcgctacggcaatcagttgtagagaatgtgcggtatcattctttggacctcttaaagggatttcgctgaaatcaattccatttgagatgcggatggtggggcgattccaaataatgtcatagtccgaaaaagtgacgatcttgtcaacatagcgtgccagatgctgtcggaaacatttgtctataaataggattcgttggtatacgaatgggagtcccttatattcttggtcgtatggatatgtcgggatttccatcactatacgtgctccggtcttttttagtagtttcatcagccgtatgctgaaagggctggcattatggacatagcgtacatagataaagtctatgttttctttctgtacataatgtacgatactgtcaaattcgattctttttaggatttttcctttgatcccgaaaccatagtcggcaattatcgattcatctaccatacggcgtttatggttgtccgtatcgtctagccaacacgtatgcatttctagtccgcattctttgagggcttttacttgataacgtatctttttactgattccgttgaatgcttcgaaaccatggaatatgaggaataatcctttcattgtttgttcttttgtaccaactttctatttcttgcaagagtcttcactttgcctgtgatatcataggtgtgtgttacttgcatatatgttccaaagataataaaacttacgaaactttttgcaataagtgttacgaaaatattcatattttccatcatataatatataggcgtgaggaatgccgttattagtaggctgacaaggagtggagaaagaagttgtctgataaatatccatgcgtttctttgaaaagtaactcgatacatcatccaatagcattgtacgaaattgatagtaaaagttatcacgatacatattgctacagctgtcagtgtgccgaaatagaatatccctgccagcattccggtcacattaagtatggacgaaaagagtccgcagacaaaaaggctccttgtatcacctgctgcctgaaaaatagagcctgaagaggagagtatgatctgaataccgaccgaaagtgacagtatccggaatacaggaaccgaaggcagccattgatcaccaaaaataatcaatgtcacttcttctgccgtaaagaaaagcagtacgctgagtggcagaccgatgaatgacagaaaacggacaatgcgttcgtaggatgttgccagcttttccttgtcattctggaaatcgctgaagatggggtgcattaccggtgtgatgacttgcgtaatattctgcagagggagcatcatcaagcggtaggacttttcatagtatcctagtgctgacaagctcatatatttaccaatcagcagtttatccagattgcggctgaagtagttaatcacgttaaacaagaattgataggccgaataggagaatatctttcggagtactttcagtcctaacgtgaaacgcagccgttgcggatagcgttgataggaaataacgaatatcagtatgctggaaagtataggattgatgatcagcgcatataaaccggctccgcaaagcgcggcagttattgctccggcacctccggctatctggatgataaagcttcggatagcaatgaacttgaactctttgttgcggtagaacaaggctcccggcacgatgttggcagaggcgaagaacaggttgacggacaggagctggcacaacgtccgtaagatcccactttcgtagtaatcggcgatcagccaggaagcggcaaaaaagagtatgctgattccgatgcctgtccatacggtgaatgagaagatgtccgatagttcttctttagtcaatgatttatgttgtacgatagcaggcgatattcccatatccgtaaagagattgaaaaatgcaataatgaccgtagcgattgccactactccgaagtcatccggagagagcaaccgcgcaagaatccctgccacgacgagtgatataatgattccgctgtatttggctagtgccgtgtagaaaactccggaaaataactgatgtttaatattgtttgccattgcctgaatgattcttttctggtctacttatgaatgatggattttgaataacaagactccgatgcttcttatagatatgagttttttgtatctaaacagacaccgccacgccagccgaagccggtacgggtaagagagcacatgagcttgccaaatgacagcattcagcatttgcgacagatataaatcaatagtattcctgattttgtattcagaggtttgatgcttgaatttgactatctcttgagcaacagtgagatatccttttaaatttttgagtgaaaaatcgcatgtcataattgaatttttacgtatgcgccggtgaaagaacgatcgttggatacagcttgttcttcgggtttgcagataaagtaaggtcgtgaatagctgatcttcgtgtacaatatccggataaaagaggagctgccgttcttccagaaaagctgtgcggataacgttcaggcaggcggatggggtgtacgttttgtgctgcaattgtatgttgatagcttcgggacctgtataaaccttgtcttctaacttatcggtacgttgataatttagtacgggagcattgcgaatattctcttcaaaaaagctctgagcatcaaagaaaacgaaatccagttctttttcttcgcatttgttatagcataactccattgcatccttttccaacagatcatcactatccatgaaatagatgtatcttccgtgggcatgcgtgatgcctgcattgcgtgccattgacaatccctggttggtttgcgaatacacctgtatccgactgtctgccgcagccagttcttctacaacttgcagactgttatccgtggagccgtcattgatgatgatgatttccaattcccgcagtgtctgattcataatgctttctactgcctcccgaacatatttttcggtgttatagacaggtatgacaacactgacttttatttttttattttccataaattctgtgtatggctactctattgttgtttgtttttgagatcgtttaaagagagagattggctaggtttctgtaaagctccgcatattcttttcctatttttccgctgttcatgttttcgatggcatatgcatagttgtcttcccccttccttcgggcggacagttggcgggctgcctccagtgctcgtatgatatcaaattggttgtcggggtggaagacggggttgcccgtatcttggaggatttctcctatattcccgatattgggacctatgaccactttgtgaaaaaggaaggcgagaggtatactggcagagttcagaatatcttttcgttggatgaatattacatccgaagcggccatgtagtaaggcaggtcgcagttgtctataggttcgtcgctggctccggcgtgcattctgcgcaggcggttgagcaagggtataagcaggtaatatcctgcccgggatgtccagcgcttgaagaagttgctgccatacctgttgaatctcgaaaacgggtacagccgtggagcaagcaggaacttctttgcttcatcccattttcggaacgctccggtcaccatccgcctctcttcacgattccggaactttccgaacgacgtgacgataaacgcctcctgcggcagattaagatactggcgcgcacgttccacgctgatgtcctccttgtatgtgtactgataaataggatgaggaatgatgacattccggctgtccgcgtgtttggctgcaaattcgtcgagactgtaacgtcccatgtgcaccaccacatcgctttgttcttcgataatgtcataagcacggccgatcacctcgttcgcatcatgcggacggacattgtggcgcgtatacacgaaccgggccccacgggaccggaaaaaagcgatacactccttcaggcggcaaatcctgtccggatcgtcacaattcccttccatcacctcttcgggccattggaagtggatgatgtcgtaaggtgtatccgagttccagaactcattcgtggaacatcgtacgtcaatccccgtcgtcctgatagcatcgcataaaatggggacaaaaagattgtccgtatctccattctctctgaaaacgattaatgcttttatcggtggattgcctatttcattgtcgttcatgcttgattctttgtttttggtgggcttttgccacatacaaaggtaataaaagatatgatacttttcatcttttttgctttttttcggtgttgtgcctttattctttgtgcgtccgttttatctctctgttactctattagttgtcaagcgtgttcatatctatgagaaacaggctcctgtcgaaggggatatgccgcttatggaggtacttctgatagtggtagcatatcgttatgaaactttgtacgctgcatttggtcacttcgttttcgtaccggctcagggtggaaatactgagattggtcacatctgccgcctcttcaaggttcagattacataggtggcgcaaatggatgattcgttctatttgtgcatgacagttcgcttcaatacgcagccggtcgtaaatttcttccttggtcgctctttcgtatcctttcataattttttctttttactaattatgccgcaaagttcatagaaaaatgtcaaacatcgtttgcagttctgcaagtagtttttcaaaaaagtattcggacctttgcagaacgaattcgggacatcctgaatcacagtcaattaattgtaagatatgaagaaagatcagtattttaatttagaggtaaattttttgagtaatgacaatattgtcagaatgatgatggaacttgacgctgcgcaatcgctcggaatctatatgatgcttcttacgcatttgcgtaaagcggacaattatgaagcatcttgttgtccgctttgtatgggggctttcgcgcggatgtatgatttggatgccgatgtgttgcaaagggttctccgtgagttcgacctttttgtgcttgatgaagaacggcaaatgttccggtcgccttatctggacagggtgatggcgaagctcgaagaaagacggatgattaatgtggcgaacggcaaaaaaggaggtcgtccgaaacgcatggagagcacgccggaaacaccgatggataaaggcgaaaaaccgaatcaaaaccagaagagtagagaagaggagagaagagttactactgttgtcaaagacaacaacagtagtaacgaagaaaagacagagaaagaaaattctgccgccgccgcttctgacagacttcagatcgttcctccaccggaggataggggacagttgcccctacagccggttcttccgtgggagatgctggtggatcagatggccgaatcggaaagttacatggagtcgatggctatgcactcctgtatgggcaaacttttcgtggaacggcaggaggaggtgattgctgcttttaaagagcatatccgacgctttggcagggaagatggcttgctgtttttgagggatgtgaaactgtatttcggcaattacctctctccgggcggacgtccggctcaggagctgaagaaaaggctgctcggcagttgccggcaagcagctgaggaagaactgtatcgctttgaacaactcattggcgggcaacggacgtatcttgggcatccgattccgaaggatgcgcctccaagaccggacaggtctgccgtgtgggatgaagtgcattggaagtggggaaattagctccggatttctccgacatccggctacgtgagcgttgcctttcagctcggtgctcgttcatgcttggctcgctgctcgttcatgcttggctcgctgcttatcggtgttcagctcgctgcccatcggtgtttagctcggtacccattgatgcttagctttccgcctgcattgggaactgatagaaaaattattaactgaagtttctcaagttctttataatattgacaaacaatagtatctcaattggggttgactaaaaagtcggttctacctttattctcctccttcctgaaggaggggaattaagatagttttgataacgcaaaggtaacctgcgaaacttgaattattaatacaacttaaaatctccttttcgaaagggaggaatagaaatacagaaatatgagaaattttgctaattatcatgtcgatgtccgcagacacaccagcggtgtcgttaaaaccatttgcgagcaatgcctcccgacgaggcacaacaagcgtgaccgttcgctgcgagtcaatatcgacacagggcattgccattgctaccattgcggagccgacttctacgtccccgacgatgccgaagagcgtgagaaagccgagcgacaggctgcccgtaaacgtcgtgcggcatctgccgttccccagcatttccatcgtccggtgtttgacgcttcgaagacgacgctttccgaggctacggagcgttggctggtagagacgcgttgtattccgcagtccgtcatcaccggtctgcgcatcacggagcaggaagagttcatgtcgcaatccggcacgaaagagcggtgcgtctgtttcaattattttgaggacgggaaactcgtcaacaccaagttccgcagcggtgccaaaaatttcaaaatggtgcagggagccgaactgattccctacaatatcgattccgtgctgggacaggacacctgtatcatccacgaaggcgaactggatgccgcttcctcccttgccgccggattcaaaagcgtgatctccgtacctgccggagcaaatgcgaacctttcgtggctcgaccgcttcatggagtcacacttcgagaatctgaaagacatcatcatagccgttgacaccgactctgccgggctcaaactgcgtgacgaactggtcaaccgtctgggtgctgaacgctgccgtgtggccgtctacggaccgggctgcaaggatgccaatgaacatcttgtcaaatatgggatcgacagccttcgtatcgccatcgagcaggcggaagaaatccctcttgaaggcatcttcaccgccgccgatctgcacgaagatctgcgggcattgttcgacaacggcttcggtcccggtgcggagacgggctgggaggagatggataagatttgtacgtacgaacgtagacggttggtcatcgttacgggcataccgggggccggaaaatcggaatggctggacgaactggtgttgcgcctctgtatgcgccatcagtggaagatagcgtttttcagtccggagaataatcctatcgtctaccatctccgcaagttgatcgagaaactgaccggacgccgttttcaaaacggttgcggcatgacggaaggacttctgctccgttcggaagagtttcttgccgaaaacgtctgtcacatcgccctcaaaggcagcgccactccggaacgggtgcttgccaaagcccgtgaacttgtcctgcgtcggggatgccgcatcttcgtcttcgacccggtcaaccgtttcgagcatacccccgcgccggggcaatcggaaacgcagtatctttccaattttctgaatctgtttacggagtttgccacgcaatataactgtctggtgattcttgtggcgcacccccgaaagatgaaccgcaatccggtgacaaaccatactccgcgtccggatatgtacgacgtaaacgggtctgccgatttcttcaacaaggcggattacggcttggtagtggagcgtgacaaggaggtcggagtgacacgtgtctatgtcgaaaaagtgaagttcaaacatctcggaacgggtggtgtggctacttttgtctacgatcccgtcagcggacgttacctcccctgcgaagagtcccaagacccgtccgtcccaccggaacaacgggtcagaaacactgtcaatgatagctcgtgctggttgccggagaaggagctgtttgaataggtaataggtaataagtaataggtaataatcgtagctggtgaggagggtggtgggtaacaggtcacgggggatgagtaacggtgcggatcactggttgaatggtgattcattttgataccggtttactttattttcgcacagttttgaggtaaatacggattcatgaaacgtcatccgatagaatgattatatttgcatttcgattctaagaaacaaataataaaccattaatctgtaaacaatgagatttagtaacgtaagattattagtaaaggacttcgccggatgcttcaaattctataccgaacaactcggattagagccagcctggggagatgagaatagcggatacgccagttttaaagtagccgacggaatagaaggtctcgccctttttgtatccgactggatggcgccctcggcaggtaatgcagataagcagcagcctgttgggatgcgtgaaaaattaatgatctcattcagtgtggataacgtggacgaaacctttgtcgcactgaaagcaaaaggcgtgacatttatcagtgagcctacggatatgcccgattgggggatgcgtaccctgtacctgcgcgatcccgaagaaaatcttatagaactctttacccctttggcaccggagaaatttagccaggaacttatcgaagaagatcagaaatttcattaagagacacggctgaaaagcaacgtgctcatccgagtgagccggaaaatgatattgaatggggctgtccgaaaagagaacgtctgctatcgttttgctctgtcatcctaagtctgccgaagaatcagctctttatattagtcaaagaagagattcttctccgtgtgctgaatgataggttgatagtatttatctacttttcggacagctttatacgttaatcgggtatcttgtccggaactattcttattttgttttaactgctgattggcaccaatacttaatacttatcttcaaggttcttgcagcacctctacgatcagtcgtacttgtgcgggtgtgtagtgtctgcttcggggattcatgccggtggatagcaggcgttcttttagtccgggtgcggcttcgatccattcgttgaagcggtctactgcgctttgttgctggacgttggggatatatagcatggcgagttctccttttccgtaactgcggtattggaaggatttttcttcttcctgtttttgcagggtatctgtatttgctttcatttttgatttaattgtagggtttgtaatgggtataaagttactgttttttactggatttagcaaatttgttgctcatgaaagtgttgcttttatgcttgtattatttagttgttattcacgttgtctgcttgtctttttggggggtgtttattcggggttggttgggagctttttcagcttttatctgctttatggttactttgtattcgcttttagtatgctttcaatctgtttctaattcactttattctgctttatgctgtcttaatccgtctttatccgttttatcccgtcatagtccggtgcagtccgttgtaatccgggaaatcgccgatgcactgccgtatctttgtttcaccaacagaaagggagaatgtccttcttttctttaatacaaattcagtatggcaacagtgtctgtggtgcgctatcagcgcaaaaaaaagattggtgatgacaaatcgccgatggtgtatgtgctcaaacccaagccgggggaatcgaaactttattctatcgagtcgctggcgcgtgagatcgagtcgatcggttcgctttcggtggaggatgtggagcacgtgatgcaatcctttgtccgttcgatgaagaaggtgctcgtagcggggaataaggtaaaagttgatggcttggggattttctataccacgcttacttgtcccggtgtggaactggaaaaggactgtacggtgaggaatatcactcgtgtcaaccttcgtttcaaggtcgataatgctctgcggcttgccaacgacagtacggcaaccacacgtggcggggacaataacatggtcttcgaacttgtctccaagaatgcgccggcttcgggaggcaacggtgatggcggaggctccggtagtggcggtggcagcggttccggtggcgatggaggggaggaggaagctcccgatcctaccgtttagtccggtaagtacatcagcatcattaatgtgtgatacctgtaaatgaataacctgtaaaaatgaaaagttatgattgacaagattttggagattgcattggaaatcctgtttttcttccgtaggaagagaaaaggaaaacgaacgaaagggcaggtcgatgaggaagattgacctgattgtgatccactgttccgcctctagggcggacagggatttcacggaaacagaccttgaagtgtgccaccgccggcggggatttaacgggattggttaccacttttatatccggaaaaatggagacatcaagactacccgccccattgaacggataggagctcatgcgaaaggctttaatcagacaagtatcggtatttgctatgagggcggacttgactgtcacgggcggcctgccgatacccgtaccgaatggcagatacactcgatgcatgtgcttgtgcttacgttgttgcgtgattatcccggttgccgggtgtgcggacatcgtgacctgagccctgatctgaacgggaacggggagatcgagccggaggaatgggtgaaggcttgtccgtgctttgatgcggaggaggagtgggcttgacgaaacttgctaatgaatatgattcaggcacggttttcatagggaaattttaggcacggatgatacggacgccaacacggatttgagaggctgcgcagccaaatccgtgttaattcgtgtcatctgtgccttttcttttcttttctttcacggtgaggctttattcttctccgtgctcggtatgaataaactttttgtttgctcctttcagtcggaacatattggctatcattgccagtgccagtgtcggaatctgcaggattgcttttcctaatttccggttcagcaactttcccggcacaggtatgatcatggcggcaacttgagcggctgacagtatccaccatttgatggctgtataccattcgtatcctccgctttgcagactcattagtaagccgattgcggtaaagagtaaagtgaaaccgaaaactcccgccagttgtatcagacggggaggcagcatccattgaagaatcttgtcgcagtagtcgatatttccttgaatcagtgctttcgggaaatcgggcaaggaagcccgcaatgcaccgtattgtgctgcaatccatcgtttacgctgatttttgataccttcttttttctgtgttttttcatcgtatacaggcagttgttccagatattcgatatgaatgcgttgttttagcaacagggcttccagctccttgtcttcgcccgatgtttgcagatgtcctacatttcggcggaaccaatgaacgtcgaatgccattccggaaccggctaatccggctgacaatcctatcgcgttgtgcccgctacggaagaatccgttgtttatttcttcgctgatcgcatccagaacagcgatgtctgtattcatgttttttcctgtgcggtgggcttgtacggcatgcaggccggactcaaaagcacggttgatttctgcgaggaaattgggagtcgttacattgtcggcatccatgatcactactacgtcataagattcgttggcagtgacgttcattgccagcgtaagggctttggctttggaactattggtatagtcggctacttgcaaacagatggggagtgtttgtagggcagcattcgtgtccggctgcatctgatcggagatgacaagaacgtcgtacatttctttggggtattcctgttcgaggaaattacggatagtggagacgatcaccctgtcttccttgtatgcagggaagagtacaagaaaacgacgcaggatacgtgcttcggaaagttttcgcggacgatagaatttggaggcaatggcgtagaacagcagataaccgacacaaagtgccagaagaataaagagaatccagtcaataaaggtgtacatggtctttcatttttaagggttatcggataggagaggtgacagaaaagcttctgacaacgcctttccatactgcggcaaataaatcgaaacgacctttcacggcaaactgaaggctgttttttccggcagctatggtagattgataaagaatggagagcagccgttgagcacctttccggttgcggcgggtgtagagcaaacggttgcgcgtcatgtagaaggtacgtagcttgctgaactgtccggtgctctggctttctttgtggaagacggtgcagcgaggctcataccatagttcgtaaccggcatttgtcatctgtgtacaccagtccatttcttcataatacaggaagaatatttccggcatttctcctactttctcaatgacttcacgttttaccatgagtgccgccccatgcaggtagggggtcgtgtgcggggtgtcgaacgtgccgtcgtccggacagccgaaacctgtcatttcgttgcgtatagtgattgccgacaggggggtgaatccggcaaactgtatgttttgcggaggaaaggcaaagcgtatcttcggagagacagctccgatgtttttctgactttccagtcgctctgtcaggtagtggaatccgtctgattcaacataagtgtcattgtttatcagaaagatataggctcctttagctactctgatccccagattatttccgccggagaagcctaggttcgactcgctccgcagggtgactatatcggaatatagctccttgattttagccgcttcgtcttcgcgcgaagcattgtctacgacgatgatttcatagctcacggaatgtacatgtgtttgcagcgattctattaattcgcaagtgtctttaaagccgttgtagcaaactgtgataaaggagacttgaggttcgttcatcataatctattgttcgtttttcagttctgtttctttactttgctgcatccgtttgtcaatgtacggtcctgcgaagcagagggcaaaggctgtgtatatggggatggagttgggatattgcatcacgtcgttggcataggctgccagatagaatccggcagcggtacagagccaggcagtaagtaagcctcgcaggcgtttgttcatgatcttgaacatcagtatccatccgcaccatgcaaaaaggactccgtgaacagccaggtagagaactagaccgatgattccggtttctacccatactgagactaaccaggaatccggtggatagggcatacgttctttgggatagaaacggtcgcctttggataaccctatcccatatccaaaaggcttgtgaatcatcaattctctcattttctttcgattgtctacacgtaattgataggaagcgtcttggctaggacgaaatgcagaacgcatcttgcggatatattgattgtcatctcctatattggtacatacaaaaaacaagaataacaaggcaagaactgaaatacctgtaatacatgctttgcgattgcgtgaaagaataatgaaactccctaaagcaccgataggcagagctatcgcagcccgtgttccagaaattcccattccgtaaatggcggcaataatgacaattataaaatagattttcagccatacaccttttatataaaaaagtgaaattccaaaaagtgaaacacccatagccatgtgtacgccgaagttcgctgcatcactgaagaatgagaaataacgaataccggaccaaataatatgagttcttgctcctcccaaaacgtataaaaaatactgctcacgttcattaaaaccacagtttttttgccaatatcctttggctgctgccaagaggatgaaaagagaccatataattagaagccactgaatccccttgatgttacggattgctaacggtacgatgacagcacatacaataggatatatgagataatgggtgatggagatattccatgctgcctgaacattgttcggattagctatctctaatatgcaataaactccccatatcagaaaaagcataagcataccattacgactttccgaccagtcaattttttcatgcattccgtacgcaaaaagcaaaacaactacaaacaatgtacacattaatgttgctactcccaatggtatgtctgtcactgcataagctgctgccagcagaaattggagagtgaaaagtgtatagaaactttgttttgaatatttgataatcaataagaaaatagctgtcattaaaggcaatgaactaatcgtcagaaagaaaggaagggaggtacgaaagaacattttgtataatatatacaatcctcctgccaatagtaaatgtacccatcctttattggcaaaatagctaccggctactgttaggtattgactgtattttcctttatcattcgtcatcttcatctcttgctgttgccggctgcttctttctttttgtgaacgtaaatatactttctgtcaatgctaattgtgacagtcggtatactattttcctccaaagtgtatatggtggaagcataccagtgtagtcttcaaccacattgcgggatgcgtgtgtcaagtaaacataaagtggagttttacctacttgttgacttagcttttctgacaaaagcttatcggtctctttccaaccacggtcagcacgggctacgagtatatttagattagcttcttgtagtaattccagcgatatgctagcttcccgcagattgggatattcaacgatgagaatatcttcttcctctgatgtgtatagatcggtaatgcttttggccaggttgtattctcgtgaatcaattctgaagtctgacttccatgttattacttttgttttaagtccgatactgttccagtatttttttagggcttcgatcacataacttttgccttccccgccttctgtgctaataaaattgataatgtagggcaatccttctttcttttgctgacagaaacgaaggatactattgcttaactgttttgtagctatactttttgattcttcaacataattgtgatactctaaaatagagtcttttggaaaggcgcctaacatcggaagtccaatcaaacgacgtgtacgaatagaatcgcgtagagtacggtctaataattcaagaattaagaagaaccccaaaataaatatgaaggtaccggcacacgctgccatcaccatttttttcaaaggagtgggcatggcactgatcggatatgccggagcatttaatacttttaatgcagcggaggtcatttccaaattttttctacgcatgagggcatcattatagcttttcaatacagacaagtaattttgctctataaaagttatgttacgctcttgacgtttgatagtggaacctactggtgcaaactgtctgtatttctcgttgaggtctatacggctttgctgtataatttgtaagtctgatttggctttttcgtattgcatggttacttcaagccactgttctatgatgttctctttagctattccttctttggtatatttgttctctacatatttgtttgaaagctcggaaagctccttgcgcgtttgatttaagcgattcttatattcctgtaatgaggcttcttgattctgatgatcacttgaaatcgtttccatttctgagatttttcctgtaagcgaagcggcttcatttagtttatccaagaactgaagattgttgattacatgtttggcattgctgcccatttgcttttccagttcgtttaacattgctttggcgctattgtatgcaatcagtacgttttgttcacgtaactcaaactctttgttgatggcagcgatttctttggtctcatcgtaataattaataacacgtttttctacgttatattgcgttagtgagtcttctttaagccgaagttcctttccgatgcgttgaagttcgcttttaaaatattcgataactttatctgtttcaccatagcggattgcactgtattcgtttacaaattctttggtcaggatgtcgatggtattataggcgatacccggatcacttgccgtataacttatttcaatcagatcgctggcacctttacgcgctactctgattgctctgagatcattataagagtaatagggcaaattataatagaatactccatagagatagtttgcttgagtcggtctcaagtaattgaaaaagttggctaccgttttatcttcgctgtttttatctattaatgacagtatttctttcccgttcggactattctttaggtgttcatatattctgttgtaattgctggctttgatgaattcattgtcttcttttggattacctttgatcagacttcgggcatataatcgcatagatacccgtttgagtgtactttcagccttgataatgttcattaggttatccatagcgttctgagttgtcgcccaatccactttgttatttccaccttctagattgtagccggaagcagcgccagtgtagagggttgcctctacgttatatgttttgcctatcatgcgttttccaaaatagtaaacagcaaatgttataatggctgttccaattagtaaccaccaacggatacgatataggaatctgctgatataaaggatgtattccataaatgtatgtttatttgtttcttaaaatgggagtgtgggtgactaactcaagtatcattaaactcttgcttaactcgaatttgctgttttcgaatttctcttgtgcgtcagattggcgagatttttcagatgataaagttcccgaatcaatagctccattcgagaaatccttttcagctatactatattgtacattagcaagcatgagggcttcggcattaagtttaagaatgtttaattgggaggtcgcagttgcgtatagaaggataatttcctttttcatttcctcaaacttaacttctctttcaagttgggcggtacgtacattcagtttttggcgttttacccgcgctgtcaagtcaaagagaccgtccaaaggaatgttgactcctgcacctactgtatatccgttctgtgcctgtgttgcataggtcaggtaaggtgcaattgctacatctgtataagtagactcgttaccgaacataccatactggtagctgccccgtaaactgaaaaagcctaagaaggcacgcttctcttttgccagaagcttccgttcaatttgttcttttactgtagctaattcataggtcggagcgctttttgcgttctcgaaaagaagatccagcggtggaagtgtaatgctggaataatcacttggttgtagttttgagtaatcgcttacctcttgcgcagttacgcttccagtggaggcaaacaaaaatagtaatcctccgaagaggtatctgatttgtttcataaattaaccctattatctgcttttgctgtgttatagcaacgcaaatataaggattaattttatttaatgatgttcttatggaagcattttatcatctttcttgttaattatgagcaaatacttgtttagaatgcctccgtcatgttgaaatagaataaattctgcttgttcaccatgtctctgccgaagtcaaaacggacgttcatacggggctgaacttcaatgcgtaaaccgagtcccagattaggaagtacaccttcgattttgcccggagtagggcccatgaagccgcatcctccccatgctacgtagcctacatgattcagcatcttcttcacccaattgcttttgtccgtatttatcatctgacggtattctgccatcatcacgtgggatgacttgtcgcgaaactgtcccatataataaccacgaaggtcgaaaggagtgccgctgagtgcgtatttagtcaatggaacattgccgaatacattctttgtttgcactgtccaagccaatactttacgtttgcctagggtcttgtattggcggtagtctatttccaaacggtagaaattattatcgcttccgaaggctttgttgtacatcatcccacgaaagtccagatacgttccccgataagcattggcgggaacgtcacgggtgtcgtacgtcagcaggaaaccgactccggaactgaggttagagtagccgtgatccgtaccgccggcagcaatatacgatggttgctctatcattcctgcggcaggtttagtgatcttgtcataattgaagtcgatctgcgggccggcaaagaagttgcttttccccagacggaataaaaaccacggattcacctgcacaccgctataacggtattcgctggtgtcttcgccacgcggatagtccttgttggtgctgtatccgatgccgtagaaattttccagtgtattcttatatgcaaagactccgaagatgcggaatcggtcgcctttgaagaaaagctgcggtttggtgaacaggttcagtcctccttcgaacatcagggcgatggccatcggcaccaccgaacgttgttgggtagtatcactcggattcatccgaaacgtcatcaatgcactaccgccgatcagtaatccgaagtcaggagtatagctggggccacctaatatattataatgtagattacgtttggctacacgctggcgtcgcaattcttttttggaaagggtgggggtgggatctgccggggctaccccgacttcgtcaacagaagttgtagtcgtttgcagttcatcgctttttactgccgtgtcagccgtttgagctaacgaaatattgatgaatagaaacatcatcaatatacctattgtatatcttttcatattctttcttgaaatccgctgcaaaggaaactattttatttcgattagttttcattctcatagataataaatctaaaaaagaatcgtatttttgccaattaataatatgtaaaacgaaattgccaacggattactattagcatacaggcaaagttaatttataaacgatctataatgaataaacgaattttatcagtttttgtttgctgtgccctttactattctgcacaggcacaggacgcgaaaggcggcatcagcactgacatgatgcagcaaatcaaacagagttatcagggcacttctaccgacaaggctatccggaacgccatcagcaacaacgacatccgtaagcttgccctgaaccaggacaacatgaaggggatggatacgcatttttctgtcaaagtgaactccaaggggatcaccgaccagaaatcatccggacgctgctggctcttcaccggtctgaacgtaatgcgtgccaaagccatcgacaaatacaatctgggttctttcgaattctcgcaaacctatcctttctttttcgaccaactggaaaaggccaaccttttccttcaaggcgtcatcgacaccggcgacaagcctatgaacgataaaatggtggaatggctgttccgcaatccgttgagcgacggcggtacattcaccggagtagcggacatcgtaagcaaatacggtctcgtccccaaagacgtgatgcccgaaacgaacagcagcgaaaacaccgcccgtatggcgaatctgatcgctctgaaacttcgcgaacaggggttacaactccgtgacatggcttcgaaaaaagctaaacctgccgctatagagaacgctaaagtggaaatgttgagcaccatttaccgtatgcttgtcctgaacttgggcgtacctcctacagaatttacctggacgcaatataatgtcaaaggcgagcctgtagaaaccgccacctacaccccgctttcttttctgaagaaatacggtgacgaaaagctgattgacaactacgtcatgctcatgaacgaccccagtcgcgaatactacaaatgttatgaaatagactacgaccgccaccgctacgacggcaagaactggacatacgtcaacctcccgatcgaggacatcaaggagatggccatcgcctctctgaaagacagcaccatgatgtattactcctgcgacgtcggcaagttcctgaactctgaccgtggtctgctcgacgtcaaaaactatgattacgactcattgatgggcaccaccttcggcatggacaagaagcagcgtatccaaagctttgccagcagctccagtcacgccatgaccctcatggcagtcgatctggacaaaaacggaaaaccgaccaaatggatggttgaaaatagttggggtgccggagccggttatcaaggtcacctcatcatgacagatgaatggttcaacgaatataccttccgtctcgttgtggaaacgaaatacgtgaccccgaaagcactcgaagtcttgaaacaaaaaccgatccgcctgccggcatgggatccaatgtttgccggcgaagaataaccaaccgacaaacacgctgcatagacttgtacgctgcaaggtcttccggcctactttattaaagaacgtgtgcgaacacaaaaggaattgcggatatttttccgtaattcctttcttttttcctcccgaatcacattattatttattacttttgcggcaaattttatgaaaccattattttatatagcatggcaaatgtaataaagttacgtaaaggccttgacataaacctgaaaggtaaagctgctgagacgtacacaacagtgaaagagccgggattttacgcactcgtacccgatgattttcctggagtgacaccgaaagtggttgtgaaagagcaggaatatgtgatggccggtggacccttgtttatcgacaagtatcatcctgaagtgaaatttgtttcgcccgtgagtggcgtagtgacgagcgttgaacgtggtgctcgccgtaaggtattgaacatcgtagtggaagctgccgcagagcaggactacgaagaatttggtaagaagaacgtatcctcgatggatgcggatgctgtgaagtccgcgcttcttgaagcaggtctgtttgcgtttatcaagcaacgtccgtatgacatcattgcagacccgacggtaacaccgaagggcatcttcgtttccgcattcgataccaatccgctggctcccgacttcgaatttgctctgaaaggcgaagaagcaaacttccagactggtcttgatgccctcgccaaaatggcaaaaacttacctgagcatcagcgtgaaacagaaagccgctgcactgacacaggctaagaacgttacaatcaccgctttcgacggaccgaaccctgccggtaacgtaggtgttcagatcaaccacctcgaccccgtttcaaagggcgaaactgtgtggacaattgatccgcaagccgttatcttcatcggtcgtctcttcaatacaggccgtgtgaatttcacccgcacagtagccgtgacaggttccgaagtgttgaaacctgcttactgcaaacttcaggtaggtgcattgctgactaacgtatttgccggaaacgtaacaactgacaaagatttgcgctacatcagtggtaacgtgctgagtggcaaacaagtttctcctaacggattcctgggtgctttccacagccaactgactgtaatccccgaaggtgatgacgttcacgaaatgttcggatggatcatgccgcgcttcaaccagttcagtgccaaccactcatatttcagctggttgatgggcaaaaaggaatatacgctggatgcacgtatcaaaggcggcgaacgccacatgatcatgtccggcgaatatgataaggtattccccatggatatcatgcccgaatatctgattaaagcgatcatcgccggtgatatcgaccgcatggaagcgctgggtatctacgaagtggctcccgaagacttcgcactctgcgaattcgtctgctcttcgaagatggaactccaacgcatcgtccgtgtcggactcgacatgctccgtgctgaaatggcataatccgcatggcaaattgtaaattgtaaatcgtaaaatagtaatatattaatgaaagcgttaagaaattatctcgataagataaagccgaactttgaagagggcggtaaattccacgcattccagtcggtgttcgacggcttcgaaacattcctgttcgtgcccagcaagactgcgaaaacgggaacgcacatacacgacgcgatcgacagcaagcgtattatgtcgattgtggttatttcgttagtaccggcgctgctgttcggtatgtacaacgtaggttaccagcatttcacccacacaggtgctactggcagcttcatcgaaatgtttatctacggattcctggctgtattgcctaaaattatcgtatcatacgttgtcggtctgggtattgagttcgtcgtagctcaatggaagaaggaggaaattcaggaaggattccttgtttccggtattctgatcccgatgatcgttccggtagactgtccgctttggattcttgccgtagcaactgcattctctgttatctttgcaaaagaagtattcggtggtacgggtatgaatgtgttcaacgtagcgttgatcacccgtgcattcctgttcttcgcttatccgaccaagatgtccggtgacgccgtttgggtatccggcgataccatttttggtatgggacaggctgtagacggtctgactgtggctaccccgctgggacaagctgctacatcgggcacggttcctgcattcaacatggatatgataacaggtcttattcccggttctatcggtgaaacaagtgtgatcgccattctgatcggtgccgttatcctgctgtggacaggcgttgcaagctggaagacgatgctttccgtattcgttggtggtgcattcatggcctgggtattcaatgctatcggcatggaaaacaacacaatggctcagatgccttggtacgaacaccttgtattgggtggtttctgcttcggtgccgtattcatggctaccgaccctgtgacatccgcacgtacggaaagaggtaaatacatcttcggattcctgatcggtgtgatggctatcgttatccgcgtactgaatccgggttatcccgaaggtatgatgctcgccatcctgctgatgaacatcttcgctccgctgatcgactactgtgtagtacagagtaatatcagccgtcgcgagaaacgcgctgttaagtctaaccaataataccgaatgaaaatgaatacaaatagtaatagttatactatcatttatgcttcggtaatggttgttatcgttgcattcctgctggcattcgttagttcttcactgaaagctacacaagacaagaatgtgcagttggacactaaaaagcagattcttgctgcattgaacattaaaaatgtagaagatgctgatgccgaatatcagaaatatgtaaaaggtgatatgctgatgaacgtagacggtacgctgactgaaaacacaggtgagtttgccactaactacgagaaagaagtgaaagaacaccaacgtctgcacgtatttgtatgtgatgtagatggtcagactaaatatgtggttcctgtatacggtgccggtctttggggcggtatctggggatacgttgctctgaacgaggacaaagacacagtttacggtgtatacttctcacacgcaagtgaaactccgggtctgggtgctgaaatcgctactgactggttccagcatgaattcgcaggcaagaagacactggaaaacggtgccgttgctctgggtgttgttaagaatggcaaggtagaaaaagctgattaccaagtggacggtatctctggtggtacgatcacttcggtaggtgtggacgctatgctgaaggcttgtctgaataattacataagttttttaactaaataataaggaggaggataaagaatatgggacaactgttttcaaagaagaataaagaagtattctctgctccgttgggaatcgataatccggtaaccgtacaggtgcttggtatctgttctgcacttgctgttactgccaagctggaacccgccattgtgatgggactttcagttactgtgattacagcgtttgccaatgtcgttatttcactgttgcgtaagacgattccaaatcgtatccgtatcatcgttcagttggtagtggttgctgctttggttaccatcgttagtgaaattctgaaagcgtttgcatacgatgtaagtgtacagctctctgtttatgtaggtttgatcattaccaactgtatcctgatgggacgtctggaagcatttgccatgcagaacggtccttgggaatcattccttgacggagttggtaacggtttgggttatgccaagattctggtaatcgtagctttcttccgcgaactgctcggttcgggaactttgcttggtttcaatatcctgaattatgagcctatccagaatatcggttatgtaaacaacggtttgatgttgatgccgccgatggcattgattatcgtagcttgcatcatctggtatcagcgtgcacgtcacaaagaactgcaagaagaaagtaattaatataaatgaagggtgaagaaggatgaatgaaggtaacactcataaactcgaaattcttcattcttaattcttaattaaaatatatggaacatttattaagtttattcgtccgctccatctttgtggacaacatgatattcgcgttcttcttgggtatgtgctcatatctggctgtatcgaagaatgtgaagactgccgtaggactgggtatagccgtaacattcgtgttgctggttacgcttccggtgaactatttattgcaaaccaaggtgctggctgccaacgctatcattgaaggtgttgacctcagcttcctgagttttattcttttcattgccgttattgccggtatcgtgcaattggtggagatggtggtagaacgtttcagcccgtcgctgtacgcttcactgggtatcttcctgccgttgattgctgttaactgtgctatcatgggtgcttctttgtttatgcaacaacgcatcaatctgggtgcaagcgatccgaaatacatcggtgatgtatgggatgcgctgtcttacgcactcggttcgggtatcggctggctgctggctatcgtcggtctggctgctatccgtgagaaaatggcttactctgatgtacctgctccgctaaaaggtctgggtatcacatttatcactgtaggtctgatggcaatcgcatttatgtgtttctctggtttgaacatctaaaaagaaaggaataagacaatggatatgaatttaatattatcaagcattggggtattccttgtggttattctgttgcttgttgttatcttgctggttgccaagaaatttctggtaccgtcaggtaacgtgaaactaacgatcaatggcgaaacaggactggaagtagagtccggttccacattgcttaatacgctggccgtaaacggtgtattcctgtcatccgcttgtggtggcaagggttcttgcggacagtgcaaatgtcaggtgcttgaaggtggcggcgaaatcctgccttctgaagttcctcacttcagccgcaaacagcaacaagaccactggcgtctgggctgtcaggtgaaagtgaagagtgacatggctatcaagatcgacgagtctgtactcggtgtgaaagagtgggagtgcgaagtgatctccaacaagaacgtggctacatttatcaaagagtttatcgtggcattgcctaaaggcgaacacatggactttatcccgggttcttacgcacagatcaagatacctaaattctcaatggattatgataaggacattgataagagcctgatcggtgaagaatatctgcctgcatgggagaaattcggtttgctgggcttgaaatgtaagaatgaagaggaaacaatccgtgcttactctatggccaactatcctgcagaaggtgaccgtatcatgctgactgtacgtatcgctacccctccgttcaagccgaaagaacagggtcctggatttatggatgtaatgccgggtatcgcttcttcttatatctttacgctgaaaccgggtgacaaggtaataatgagtggtccttatggagacttccatccgattttcgactctaacaaggaaatgatgtggatcggtggtggtgccggtatggctccgttgcgtgcacagattatgcacttgacgaaaacattgcatacgaccgaccgcaagatgtcttacttctatggtgcccgtgcgctgaacgaagtattctatctggaagacttcctgcaaattgaaaaggatttcccgaacttcacattccatctggcactcgaccgtccggatcctgctgctgatgctgccggtgtgaaatatactccgggtttcgtacacaacgtaatttatgaaacttacttgaagaaccacgaagctcctgaagatattgaatactacatgtgtggtcctggtccgatgtcgaaagctgtagagaagatgctcgacgatctgggcgttccggctcagaacctgatgttcgataactttggaggataatcttcggaagttgatctccggtcggaaaggaccggaagaataacataaagaaactggcgggaaatctgtaaaagacaatggtgcttttcagatttcccgctttctttatgcactatcttaccgaatcttttcgtcctttttgtatctttgtccccatgttagagaaaaatgaaataatacagtccgctcttcagaatttgaagattgaatctttgaacccgatgcaggaagctgcgctcgaacagggcacgggcaggaaagatgttatcctgttgtcaccgacaggatcgggcaagacattggcttatcttttgcctctgttgcttaccctaaaaccgaatgatgacagcgtgcaggtgctgattctggtgccttcccgtgagttggctttacagatagataccgtgttccggagcatgggaacttcctggaaaacgtgttgctgctacggcgggcatcccattgccgaagaaaagaaaagcattgcaggaaatcatcctgccattatccttggtactccgggacgtatcaccgaccatctgtccaaagggaactttgatcccgaaacaatcgagactttgattatcgatgagtttgataaatcgctggagttcggctttcatgatgagatggcagagatcattacccagcttccgggattaaagaaacgtatgctgctgtcggctactgatgccgaagaaattcctcagtttacgggactgaaccggacagtcaaactggattttcttccggaggcaaccgaagaacaggaaaaccggttgaagctgatgaaggtgctttctccttccaaagataagattgatacgctttacaacttgctttgttcattgggaagcagctccagcattgtcttctgtaatcatcgggatgcggtggatcgtgtgcacaagctactcgaagataagaaactatcagccgaacgttttcatggcggtatggaacagccggatcgggaacgggcattgtataagttccgtaacggaagctgtcatgtactgatctctaccgacctcgctgcccgtggacttgatattccggagatagagcatatcattcactatcatctgcctgtaaacgaagaagcgtttacacatcgtaacggacgtacggcacgttgggatgcaacaggtacttcttatctgattcttcacacagaagagaaactacctgaatatattcccgaaggtatagaaacgatggaactgccggaaaatccttcgcgtcctcctagatcagtctggactactatatatataggtaaaggaaagaaggagaaactgagccggatggacattgccggattcctttataaaagaggtaatctgacccgtgaagatgtaggtgcgattgatgtgaaagaacattatgcttttgttgccgttcgtcgggcaaaagtgaagcaactcctgaatcttattcaaggggaaaaaatcaaaggaatgaagactatcattgaggaagccaaataaagggagccgaaaaacaacaggtgttctcaaagctgaaaggtgaatttcaagaaccaaataggtgattgggatgctgacaatgacgaaatgatcggctttgtcattacaaataatatcattcttttgaagtgagagacgtctctcatggatgacagactaaaatgatagtaaagaacaattctgtgacagtctccatttattttcttttaggaagatattggagactcctttctttctgactaatttttataattgtagtctcgttgcctgttagggtgagaaatcctcgtttttctctgtctttcttaataaatattcattttataaccgttttcctttcattctataaccgattattttccacaggttatattttcgccttttatcccttgcttgatatgtatagataacaatatggtgtatatatcttgtataaaccaataaaaagaaagagaaatctgctttaaaacagtatttttataaggaaagatttgtgcaccggaaataaattcgtaaattcgcaaggtcaaaagacataaactaacgaaatgttaaaccaaaaacaaacttcaaatgaaaaagcataatttcaatgcaggaccttccattcttccgcgtgaggtgatagaggatacagcgaaggctattttagatttcaacggctctggtctctccctgatggaaatcagtcaccgtgccaaagacttccaacctgtggttgacgaagcagaggcattattcaaggaattactcaatatccccgaaggttattcggtactgttccttggtggtggtgctagtatggagttctgcatggtacctttcaacttccttgaaaaaaaggctgcttatctgaatacaggtgtgtgggcaaagaaagcaatgaaagaagctaaggggtttggtgaagtcgtagaagttgcttcttccgctgaagctacatatacttacatcccgaaagattacacaattcctgctgacgcagattatttccacataactaccaataacacgatttatggtacagaattaaaagaagatctcaactctccggttccgatggttgccgatatgtcttctgatattttctctcgtccgatcgacgtttccaaatatatctgtatctatggtggtgcgcagaaaaatctggctcctgccggtgttacattcgttatcgtgaagaatgatgcggtaggtaaagtttctcgttacatcccgtcaatgctgaactatcagactcatatcgataacggttctatgttcaacactcctccggtagtgcctatttatgctgcactgttgaacctgcgttggattaaggcacagggtggtgtgaaagaaatggaacgtcgtgctatcgaaaaggctgatatgctgtacgctgaaatcgatcgtaacaaactgttcgtaggtactgctgccaaagaagaccgttcacgcatgaacatctgtttcgtgatggctcccgaatacaaggatctggaagctgacttcatgaagttcgctacagaaaaaggtatggtaggtatcaaaggacaccgttcagtgggtggtttccgtgcatcttgctacaatgctctgccgaaagaaagcgtacaagctttgatcgactgcatgcaggaatttgaaaaacttcattaataatataaatagagtcaccacagattgcacggatttacactgaaatcttattgaatatagtgtgtaggccggtgaaatctgtggtgaatcttttttaaaagatacagataaattatgaaagtacttgtagctactgaaaaaccgtttgccaaagttgctgtagacggtatccgtaaagaaatcgaagcagccggatatgagcttgctttgctggagaaatataccgataaagcacagttgctggatgcagtgaaagatgctaatgctatcattatccgtagtgatattattgatgcagaggtgctggatgctgctaaagaactgaagattgtagttcgtgctggtgccggatacgataatgtagacctggctgccgctaccgctcacaatgtttgcgtgatgaatactccgggacagaactccaatgctgttgccgaactggctttgggcatgatggtatacgccgttcgtaacttctataacggtacttccggtacagaattgatgggcaagaaactgggtatccatgcatacggaaacgttggtcgtaacgttgcccgtgtagctaaaggcttcggaatggaagtgtacgcctatgacgctttctgtccgaaagaagtgattgagaaagatggcgtgaaggcacttgactctgcagaagaactgtacaagacttgtcaggtagtgtctcttcatatcccggcaactgctgaaacgaagaactctatcaactacgctttgctgaaagagatgccaaaaggcgctatgctggtgaacactgcccgtaaggaagtgatcaacgaagccgagctgatcaaattgatggaagaccgtgccgacttcaagtatatgacagatatcatgcctgctgctaatgcggaatttgctgagaagtttgcaggacgttatttctctactccgaagaagatgggtgcacagactgccgaagcaaatatcaatgccggtattgctgccgctcaacagattgttggtttcctgaaagacggttgcgagaagttcagagtaaacaaataatgagatgaatagtaagactgcttatcgttgttcagtcacttatttgatgataggtgctggtgtacattaagtagtatattcagaaatatgttatcagatttcgccctcagcttttgcgagggcgtatctgttgtactaatcttaaaaacataccatgacttatggctattatcaaaccttttaagggcgttcgccctccacaagacctggttgaacaggttgcttcccgtccttacgatgtattaaattcagaagaagcgcgtacagaagcagctggaaatgaaaaatccctttatcatatcattaagcccgagattgactttcctgttggtacggatgaacacgatgaacgtgtttatgagaaagctgccgaaaacttccggctgtttcaggataaaggctggttagtgcaggatgcaaaggaaaactattacatctatgcccagaccatgaacgggaaaactcagtatggactggtagtaggcgcttatgttcctgactatatgaacggtatcatcaagaagcatgagcttacccgtcgtgataaggaagaagaccgtatgaagcacgttcgtgtgaacaatgcgaatatcgaacctgtattctttgcctatcccgataatgcgaaattggatacaatcattcggaaatacacagccgaaaagcctgtttacgactttatcgctccgggtgatggcttcggacatactttctggattgttgaccaggacgaagatatcgctgcaattactacagaatttgctaaaatgccggcattatatattgccgacgggcatcatcgttccgctgctgctgctctggtaggtgccgagaaagcaaagcaaaacgcgaaccatcgtggcgatgaagagtataactatttcatggctgtatgtttccctgccaatcaattgactatcatcgactataaccgtgtagtaaaagacctcaacgggctgactcccgaacaatttcttgctgcattggataagaattttgttgtagaagaaaagggtacagatatctataaaccgtccggtttgcacaatttctccctctatcttggcgacaagtggtatagtttgacggcaaaggcaggtacatacaatgacaatgatcctatcggtgtgcttgacgttactatttcttccaatctgattttagatgagattttaggaatcaaagacctccgttcggataagcgtattgactttgtgggcggtatccgcggtttgggagaattgaagaagcgtgttgacagtggagaaatgaaagtagctctggctctttatcccgtatccatgaagcaattgatggatattgccgatactggcaacattatgcctcccaaaacgacttggtttgaaccgaaacttcgttcaggactggttatccataagttggattaagacatattctatatagaaaatagagcggtcaatctctcacaaatgtcctgttgattgtgagagattgaccgcttgtttttgtataaatgaccgcccgattccgttaaaacgaccacccgactacctccaattgactgcttgattgcaccccatcgaccgtttgactgcatgaaatgaagcgctcgtttcaatgagaagctctaatattttcgaacagcagatggaatttcgtcaagaaagccgtatctttgcggcatgactgctgaagatacttataaaactatcgtcgaaccttccgaaggtatttatacagaaaagcgaagcaagtttattgccatcgccttgcctgtgcgtacccttgatgagataaaagcgcatcttgaaacgtatcagaagaagtattatgatgcacggcacgtgtgctatgcttatatgttaggtgcagcgcgaaaggattttcgagccaatgataacggtgaaccttcgggaacggcgggaaagcccattctcgggcaaattaactctaatgaactgactgatattctgattattgtagtccgttatttcggtggaatcaagttaggaacgagcggactgattgtagcttataaagcagctgctgccgaagcaatatctgccgctaccattatagaaaaaacggtagatgaagaagtgaccgtaatgtttgaatatccttttatgaacgatatcatgcgtattgtaaaggaggaagaaccggaaattctcagtcaatcgtacgatatggattgcagcatgacgttgtgtattcgtcgttccatgatgcccaaactgcgtgcacgattggagaaagtggagaccgcaaggattcttgatgaagagtaaaataaagaaaaataagaatatatggcatttgaagcaacaaaaagagaatggtgtgaactgtatactttcttccgtctgctgacagagggaaaagtaacgttgggtacggctaaggcaaagaaaggagaaatcgactggcctattgcaatgattcaacgggaggaacatgacggaacacgctgctactatatagaaaaagagatggtccgcatcaaaggagaaaatagtgagaaatccgttccccgggaagattttgggattgtggcagatttgattttgcaggctgtcaagtcctcttcggaggatgaagtcacttctccggatggagtggaagagtttttggatgaagtcgcaattttcgatctggaagcgaagacggaagatcgtaccgatttttatattgccttctggcatccggaggcaccgttgagcgggttcagcgttcgttcgcgattgggtgctatgaatccgctgttggacggaggccgtgcggctaacttgaaactggaacagagcggagtcaaatttgcaacacctacggtgaataagattaatgcgttgccggaagcccctaatgaagtagcagaacgaatgttgctgattgagcgcttgggtggtgtactcaaatactcggacgtggcagatcgggtattccgtagcaatcttttaatgattgacttacactttcctcgtgtgctgacagaaatggtgcgcatcatgcacttggacgacatcacccgtatcagtgaactgacggaagtaatcaaacagatgaacccgttgaaaataaaagatgaattggtaaacaaacatggtttctatgagtttaaagtgaagcaattcctgatggcattagccttgggtatgcgtccggcaaagatatatactggacaggattcggctgttgaaggtatcctgttgatggatgggagtggggaagttctttgctatcacaagtcagagaaaccggttatggaggacttcctgttcttgaatacccgtttggagaaaggttctctggataaagacaaatacggctttttggaaagagagaacggtacgtattacttcaaactgaatgcaaagatcggattggtaaaacgataaatgcaagtggtgaacgagttgtaagtatagtaaatatagtatatgaaaacgaatgaagttttagaaaatatcaaagcacgtcgtagtgtacgggcttatactgaccggcaagtttcggaagaagacttacaggctattctggaagctgccacttttgcacccagtgggatgcatttggagacatggcattttaccgctattcagaatgcagataaactggcagaattgaatgaacggattaaaggcgcttttgctaaaagcgatgaaccgaaattacaggaacgtggtcatagcaaggcgtattgctgttattatcatgccccgactttggtgatcgtgtccaacgaacccactcaatggtgggccggcatggattgtgcctgcgcgattgagaatatgtttttggctgcccattctctgggaatcggatcttgctggatcaatcagttgggtacgacttgcgatgatcccgaagttcgtgaatttataagctctttgggtgtaccggagaatcataaagtatatggctgtgtagctttaggatatgttgatcctaaaatctcactaagggagaaaatggtaaaagccggaacagtgactgttgtcagatagaaccagactatgttttcgacaaacatggaatggaatgaagagcagcatgataaccgtaaggtttcggagtcgcttcttatgttcatttagctcggtgcttattggaatacgctcggtgcttaacaaaggtaagcccggagctcacatttgctgagctccgggcttattttttcatgtacggatttcctttgaaagcttcttcttattcgaacgttccgtagcgggtcggcaataatttccggtctcccaacgtattgtctacgcgagccacattcacccagaacttattctcacgcacgctttctatcggatacgctgctttctcacgtgtgtaggaatgttcccagttatcattcacaatttcatattccggatgcggggcgttgactaatacattatcattcttatctgcttcttcgtttttcacttcctggatttctttccatatattcagcatgacgtctataaagttgttcaactccgccaggctttcgctttcagtaggttcaatcatcaatgtgccgtgaacagggaaggagagagtcggtgcatgatagccgtagtccatcagacgcttcgcgatgtcattttctgagatacccgtttcttcatgtaccttgcggcattccagaatcatttcatgtccgacgaaaccggtagctccccgataaacaataccgtaagtatcttttagacaggcagccagatagttggcattgagaatggctattttagtagcctgagtcaagccttcggtacccatcatccggatgtagccgtatgtgataggcaagatacccgcactgccgaacggagctgcggaaacctgattttgcgtactgccgaagatcgaatgtcccggcaagaatggaaccagatgctcagctacacagatagggcctacacccggaccgccgccgccatgtggtgaagcaaacgtcttgtgcaaattcaagtgacaaacgtctgcacctataaatcccggattggtcaatcctacctgtgcattcatgttggcaccatccatatatacttgtgcgccacaagagtggatgatttcacagatttcctttatttccgtctcgaagataccatgcgttgacggataggtgatcatcagtgcagccagtgcttccttgttctcttcggctttggcacgcaggtcgcccatatctacgtttccttgctcgtcgcaagcgcaggtgacggtttcaaatccggcttgtatggcagatgcaggattcgtaccgtgtgccgaagccggaatcaatattttgttgcgatgtccttgaccaatactttcaagatacgcacggataactcgcagaccggcatattctcccgcagcacccgagttcggctgcaggctgacacctgcaaatccggtaataaccttcaagtcctcgctcaaattgctgatcaattcacgatatccttccgcctgatcttccggcaccaacggatgcatgctcataaactccggacggcttaaaggaagcatttcagcggctgcgttgagcttcatcgtgcacgatccgagggaaatcatggactgggccaatgaaatatccttccgatccagacgtttgatgtagcgcatcatttccgtttccgtatgatagttggagaacacctcgtgcgtgaggaaaggtgtggtgcgtttcagtgctttgtcaatattgctcttttccggcacgtcctctaccttctgataatctttcccggcggcaatggcgaaaatggaaagcaacacgttcgtagctgctacgtctgtcgtttcatcgatgctgaaacctacgtctccgttctcgtaatagcgcaggttcacttccttgcttagtgcgatcgtgcgaatctgctgcgccgaaacgtgttccggcaactcgaaacgtagcgtatcgaaatattgtgcattgacttgcgtatatccgaatttctttaattgcttgtcgaggaagacagtgatgctatgaatacgcgaagcaatcgttctgattccttcctgtccgtgatatacagcgtagaaacctgctatcgtagcgagtaatgcctgagccgtgcaaatattggaagtggctttttcgcgtttgatatgctgttcgcgtgtctgcaaagccattcggtagcagagtttgccgtatttgtctttggaccatccgatgatgcgtcccggcatgttccgcttgtactcgtcacgtgtagcgaagtaggctgccgaagggccaccgtaaaacattggtgtacccagacgttgtgttgtaccgaatacgatatccgctccccattctcccggaggagtcagcagggcaagactcagaatgtcagcggcaacggcaactttgcagtctgcttcatgtgccttttttgtgaagtcggcatagtcttccacattaccgctggaattaggatattgcaggatgcaggcgaagatttccggtgagggttcaaactctttatatttgcctgtgcgcaattcgatgccttgtggaatggcacgtgtggtcattactgccaaggtctgcgggaagatgttttcgtccacaaagactatgttggcacctgctttctgttgggcacgcgaacgcagagcatacatcatggttacggcttcggcggcggcagtcgcttcatccagcagtgaacagttagcgagcggcatagcggtgaggtcacagacggcagtctggaaattcatcaacgcttccagtcttccttgcgacacttctgtctgataaggcgtgtaagaagtataccatacgggattttcgaatacattccgttggataacggcaggagtaatcgtattataccaccccaatccgatgtatgtcgtatacagtttgtttttacttgccaggtcggcaatgtgttttccaaattcgtattccgtcaacggcttggctagtgccagcggttccttcagtcggatgttggcagggatggttttgttgatcagttcatccagtgagtctacgcctattttgcggagcatcacagctgtgtcttcttcattgatgccgatgtgacggctagctaacaaatctgttttcataatttatgggggatgtttttaagtaataggtaataagtaataagtaatatccatgcggataaatatactggcagctacgattattacctgttacttattacctattacttgtattctttttttatctgaaaaatggattctctgccttctccattccgatagtcgttggcgcaccatgtccggggtatacgactgtctcgttgggaagtacgaataaacggctgcaaatgtgatcgatcagttcgtcgaagttgccacccgacagatcggcacgaccgatgctgccttgaaacaatacgtcaccggaaaacatgcagttttcttccttgcaataatacaccaggctaccgggcgaatgtccggggacatggattgcttccagtttggtgtgtccgaaagtgatgatatctccgtcatgcagatatttccccaacggaaccggttcttcctgcaattggaagccgaacatacggctctgtttcggagcttcatcgatccagaactcatccgccttattggcttctgccgacagaccgaactctttcagcataaacggattgccgaagatgtgatccagatgtaagtgagtattcagcagatgtttcactgttaactcattggtgaggatgaacttctttagtgcttgtttttcctcttcgtagaagcagcccggatcgatgacaaccgcctcttttgtgtcatcccataaaacgtagcaatttacgggaaacatattaaactcaaatctctttattttcatggttttgataactcctgattcctatatttgtgaatatactaccttctttgtttcaaagaactcttcctcgaagttttcgctcaggctgtggatgactgttttatgcttgaacggcatcgtttcatgctccagttcgcctcctttgagacagattagtccgttgggcaaagcattctgctgtttgggggaaatgttctttttgatgatcttgatcagatccgccaaaggcattacggcacggctcacgacgaaatcgaactgttgtttttcctcttcggcacgggcatgacggaaagtgacgtttttcagtccgatggcattggccacttctgtcgccacacgtactttcttgccgatgctgtctaccagatgaaacttggtttcggggaacaggatggcgagcggaatgccgggaaatcctcctcctgtacccagatccatgaccttggttccaggacggaattgaatcactttggcgatgcctaatgaatggagaacatgatgctcgtacagattttcgatgtctttgcgggagataacgttgattttcgcattccagtcgatgtagaggtcgtatagagcggcaaactgtttacgctgctcttccgtcagatccggaaaatatttcagtatgatttccactttaagtattttgaatggtgaattttgatttataagtgaaatgaatatccttctgcatcacacggggcaataacaacaggatattcattggtgttcaatcttttaatagctgtttaatctttcaggtctccaagaattgggttgctgcccagcagatgttccatcatagagtatggaatggtaactttgacaggtcccatcgagtacggtgtgatgtcgtatatattatagtagaaggtgataccttctttactcagatagaagttctctgtcggggcgatgtctccggtcgaagcatatcccatgtcttccagcgcttcgtgagtagttactttgttgtcagccatcagctggttccagatcagatccgtcagggcttcctggaagtcgcctacaaaaatatcatcgaggcggagcggacgcatcagagtgagatccatgttcaggaaagtcgacatatacataccgtgtgcgcctccggtatattcgttgtagtcaacgcgatatactagcaggtctttctcataaagttgcacgtggctttcgatgctcttgtaataggagtaccatgcgcctaccactgcatcgctttctttattcttttcgtcttcggcgtacatcggctcttggtcgtggcgatactcgtcaatgtaattcttggcgtattgcttcactaccgcttctggcttttcgccgatatatttgtctccgaagcagacggagatgaagtaagcgttcagactgtctttcagcatctcgtccgacgacttgacgggataggcgaagttgatgataatattgcacgcgggtttggcggtgtcattaaagaggtgtgccgtctcgttaacctgtatactatcgaattgtaatgctcccgtgtttttgttcatcttgtcatgacaagaaaacaaaaagccgcttaccgaaagtataaccgcaagcagactgacatattgttttttcatactcgttttttctataaattcaacattgatcatatctatcactatcgacaaatataaatgaaattaccgaatactgcgaataaaaaaggaaaaatattcagctactttctccggcaatgtatataggggatgccattgttaatgattctttttttcttgcttctgtatcatatgttacagttttaatctgtacgccgtacttatctttgcagaaaaaatagattatggaacagttacatgcacacgaagtccttcacatgatggagggaaatagttatactgaggcatctctgagggctgcaattgtagagaagtttggcgaacatcagcgtttttatacttgttcggcagataatatggaagtggatgaactgatcggatttcttaaacgaaaagggaagttcatgcctgccggtgaggaatttacggtcgatatcagtaaggtatgcagtcattgattctctgtggcggacggtatgatagataagccaataggatagttgagagaagaaatgttagtagtcataggttatacctgtcgtttttcatagatagggaaatccctattagcaagtaggaagaagtctttgcgaagggaattttctcagactacatttggggtattcaaaaaaactactaaactatacctattatgaaaaagagtcagatccttatgtctttgctgctggtgatattgctcagcagttgttatgcaagcagaattacttatgagaatttgagtattatccaacgtgggatgtcttcaaaagaagtaatagctattatgggtaaaccgagctatcgaagttttgacgaagagagtgagatgctggaatttcgtacttccgagtcaagtattgcaggagtcgttaatatctggttcgttgatgaccgggtgactaagatgaaaagttatcataccaatggctgtatggaccggaacagagccatagaggataaggaagaggaggaatctgcaaagaaggaaaagaaagaaaaagaagaaacaagcgcccgcatacgtgtgaagacggacggaaagcatatcatacagactggttccatcatagtcactccggatggaaagcacgagacggtggtcagtgattgtggtggagtaatcataacagcttcgggggagcatatacttgctccttaacgccttccgtcaattcaccatacccttgtcaataccaaatttctcgtctgtctgacattcgccggcaggttccacgtgtactaagatatcatagacattgtctatagagctttttatgcttttctccacagcgtcggctatctgatgggcctgtgtgatggttatctgcggatttacctcgatatcgagggtaatcatataaagattcccgatcattcttgatcttacccggtgtgggttgctcgcaccgggaactgtttctactgcttcgaatatcttattgtacacattgacatctttgacgccatccatcaattccacattcgaatcgatgaaaatgccaatcgaagattttatgataaagaggctgatgattagtcctgtgatggagtcgagtataggcagtttgaatatgaacgtgaatatcagtcccagcagcacaccggaggaaatgataacatcattgcgcatattgatggcattggccgtcagcatggagctatctatctttttcccttgtttgtactgatataaagccaggagaagtttgccgataatcgaaaagatcgtgacgtatatagcaatggctgacggaatttcttttgcttcttcggaaaagatacttccgatagatgatatcaacatttgcacccctgcatagaatatcacaagcgaaagaattttagtcgcaatcccttcggctttctcatagccgaatacgtacttcttggaaggcggctggctgataatgcgtgctgtgaaaatcatgacaatggagatgatcacatccgttgccgaatcaataccgtcgcctagcacggcaagactgccggcccataaacctacgatgatttttgatgtggaaagtatggcattaccaatagtactaatccaggaagttctgattaatatctgctctcttttagctttcatgtgattaagcctttgacattccggttagtatatagctgcctttcaagttattttctttcatataattgactacttctatccggcaagctgacattaaagcgtatcctgttaagttcccgtttatagctttaatgaacgaatactctgtatcgttgtggatgaaagatatacgatgatattccatgacatgatgtatttaaaagaactaatatgtggtcaaatatacggataatatcagtagtacgaataaaaatggagaattatttaatttgatattgttgccggaataccttatctttgtctcccgaaatgaagagactagcctacataacagcagtgatcctttctctcctgattatctattcaggggcgggagtatctattgttcattattgctgttcccgttgtgagactgtgcagggctgttgtgccgatggctgtcccaaatgtaagaagtctcatacttgcgattcaaagaaagattgtagagaaaagggctgtacggcaactatctataagcccgatttgatgaagcatatttccgaactgacagtttccgttccggtgataacacttttctgtgaacagtattgtcagctatttgctttcacttctatagaccggacggtggacttttccagtcttccttctccgccatctccctgtccgaggcagaagctggcgttacattccgtttttctgatttagctgttatttcatcttttttgtccgattgtactttgttttcagcctttgcagggtatgaaaacaaggagaatgaatgcaactcagttgcaagagaaatgaattaattttgtatcgcaaaactaagtccaagaaagaatgaaatatataataatgggactgttctcattacttgcagttacgacacaagcgcaggtgcggggaatagtcaaagataataccggagagcctgttccgggtgctaatgtattctgggtgaatacggagcagggtgtaactaccaaggaagatggcagcttttctatctccaaaccttcgaagagtcacatgctggtaatcagttttatcggttttcagaatgacacgattcatgtcagcaagaagaatcaggaactggacattacccttcgagaaggtgtagaactgaatgaagtaaatgtagtcagccgcagaatgggaacgatgaagttgcgcagcagcgtgatgaacgaagagatgataagcagtgccgaattgagcagggctgcctgctgtaatctgggagaaagtttcgtgaccaacccttcggtggacgtgagctattcggatgcggcaacgggagccaagcagatcaaactgctcggattgtccggaacttatgtacagatgctcacggagaatatcccgaactatcgcggtgcggcatctccttatggtttgggatatgtccccggtccgtggatgcaaagcatacaggtttccaaaggaatctcatcggtgaagaatggctacgaagctatcacggggcagattaatgtagagttcaaaaagccgcagttgccggaggccgactgggtatccgccaatcttttcgcaagcagtaccaaccggtatgaggcgaatgcggacgctaccttaaagttgtcaaaacgttggggtacctctttactggcacattatgagaatgaaaccaaagcgcacgacggcaatgatgacggcttcgtggatatcccccaagtagagcagtataacctgtggaaccgatgggcctatatgggagatcattatgtctttcaggcaggcttcaaggccctttccgaaagtcgcactagcgggcaggcacatcatacggatatgcagacgggtgatctttataaagtaggaatcgataccgaacgttacgaatttttcaccaagaatgcttatatatttaataaggagaagaatacgaatctggcactgattctttctgccagttggcacaatcaggatgccatgtacggacgaaaactatacaatgtagaccagacaaatgtgtatgcctctttgatgtttgaaacagagtttaataagcagaacagtttctcggcggggctgagtttcaactatgacgcttatgaccagcattatcggttggagaatcaaacggaattgccgctcatcaaggcttttgccaaagaagcggttcccggagcctatgcgcaatacacgctgaatctgaatgatcagtggatgctgatggcaggtctgcgtggtgactatagcaatgagcacggtttctttgtgactccccgtgcacatcttaaatacaatccgaatgagtacgtacacttccgcctctctgccggaaaaggttaccgtacgaatcatgtactggcagaaaataactacctgctttccagtagccgaaaggtcgaaatagcgaaaggactggacatggaagaagcatggaactatggtgccagtgtatccacctacgtacctgtatttggcaaaacgctgaatatcaatgccgaatattattacacagacttcctgaagcaagtcgtggtggatatggacagtaatcctcacgaagtagccttttacaatttggacgggcgttcctattcgcatgtattccaagtagaggcaagctatcctttttttaaaggatttaccttgacgggagcttaccgtctgacggatgctcagaccacctacaaaggtcagcggatggagaaaccgttgaccagcaaatacaaaggactgctgaccgcttcgtaccagactccactcggaatatggcagtttgatgctacgctccagctcaatggcggaggaagaatgccttccccttacgagttggcagacggtcagctatcttgggagcgccgctatggcagcttcgagcaactgagtgcccagattacccgctatttccgccgctggtctgtctacataggaggggagaacctgacaaacttcaaacagaagaatccgatcattgacgcagcaaacccgtggggaggaaacttcgactcaacgatgatatggggacctgtgcacggggcaaaagcctatatcggaatacgtttcaatctggcaagaaatgaataataaccattaaacgaataagaaaaatgagaacaaaaagatggatggccacttgcgtggtggctcttttgagcgtagcagccgtgttggcaaaggatatccgtgtagtagtattcaaagtctctcagatgcactgcgagaactgcgagaagaaagtgaaaaataacatgcgcttcgagaaaggcgtgaaggaactttccaccgaactgaagaacaaaaccgtgtccatcacctacgatgccgaaaagacagatgtgaagaagttgcaggcaggattcaagaagttcaattatgaggccgagtttgtgaaggaaaccaagcaggacggcaagaaagatggcaaacaagaatctaagaaagaggataagaaggccgataagaagtaatcgaacaaatacccgtatttgcttgttttataaatactaattaattaaagagtaaaggattatatgggtaatatagcaaaaaaagcgtttcccgtgcttaatatgcattgtgcgggatgcgctaacaatgtagaaaagacagtgaaaaagttgccgggagtcgttgatgcttccgtcaactttgcttcaaatacattgacgatttcttatgaggacgacaagctcacccccggagaaatccgtgcagcggtacttgctgccggttatgatctgatagtagaagaagcgaataaagaagaacgtcgggaagaagaacagcataagcgctaccttcgtctgaaacggaaagtgatcggtgcgtggatatttgtagtgccgttgcttatcttttcaatgttattaatgcatatgccatactctaacgagatacaaatgttgcttgctattccggtaatggtgctcttcggaggaagtttcttcacgggggcatggaaacaggcgaagatcggtcgtagcaatatggatacgttggttgcgttgagtacctcgatagccttccttttcagtttgttcaacactttctttccgcagttttggacagatcgcggactggaaccgcacgtctattacgaagcttccgcagtgatcattgccttcgttctgaccggaaagatgatggaggaacgcgccaaaggaaatacctcggatgccattcgcaaactgatgggaatgcagcccaaagtggcacgtgtattgcgtggtggggtagaggaagagatacaaatagacctgttgcaggtaggcgatatggtggtagtccgtcccggcgaacagattcccgtggatggccagctttcggagggcgattcgtatgtggatgaaagtatgattagcggtgagccgattccggtagagaagaaaaagggcgataaggtccttgccggaacaatcaatcagcgcggttccttcatcattcgtgcttctcaggtgggaagtgatactgtgctggcacgcatcattcacatggtgcaggaagcacaaggcagcaaagctcctgtgcagcgtatcgtagaccgtattacaggcatcttcgttcctgtcgtgttgggaattgccattctgacgtttgtgctgtgggtagctatcggtggcagtgagtatatttcttatggtattctttctgctgtatccgttctggtcatagcctgtccctgtgctctgggacttgccacacctactgcgctgatggtgggaatcggtaaagctgccggacagcatattctgataaaagacgccgtcgctctggagcagatgcgtaaggtagatgtggtggtactggataaaaccggtactttgaccgaaggacatcctaccgctaccggatggttgtgggcacagccgcaggaagaacacttcaaagatgtacttcttgctgccgagctgaaatcggaacacccgttggcaggcgcgattgtagccgtactccaagacgaggaaaagataactcccgctcctttgagcagttttgaaagcatcacaggcaaaggtataaaggtgttttatcaaggtaagacttactgggtgggcagccataaacttctgaaagatttcagcgctacagtaagcgatgtcatggctgatatgctggtacactacgaatcagacggaaacggaatcatatacttcggacgtgagaatgaacttttggctatcattgccgtttccgacccgatcaaggctacttctgccgaggcagtgaaagaactgaaacgtcagggcattgatatctgtatgcttaccggtgacggtcagcggacagctttggcagtctcttcccgtctgggtatcgagcgatttgtggcagatgccttgccggacgataaagccgaatttgtgcgtgagctgcaaatgcagggaaagaaagtggcaatggtgggcgatggtatcaatgactcacaggcactggcgttggctgacgtcagcattgctatgggaaagggtacggatattgctatggatgtcgctatggtgacgctgatgacgtccgacttgctgttactccccaaagccttcgaactgtccaggcagactgtacgactgattcatcaaaaccttttctgggcatttatctacaacctgatcggtattcctatcgctgccggagtattgttccctataaacggattgttgctgaatccgatgctggcaagtgccgccatggcattctccagtgtgagtgtagtgctcaattcgttgagtttgggaagaaggaagatttaaacatcgaaagggagcgtggtaaagttcctttataactttaaattaggcatggattacgcggattaacacggattttaaacctttagaactgtgtaattcgcgtaattcgtgcctaaataatatcataatgaagattggtcatatgtagcctccatccatgatatagcctttgattacaaacctcaactatttctaaattccagcggtgacatccctacatgccgtctgaagaacttgcagaagaaagagggattcgggaaattcagcgaataagctatctcctgaatagtcatatccgtaccctttagctgcgctttggcatcaataatgacaatataagcaatagtatccaatacacttttccccgtcacttgttttacggtggtgctcagatgttgcagagagattcccagttgatcggcatagaactgtgcacaacgctggtctttgtagtgttcagtgatcagttgaatcaacttccggcaaatctctttcttacggttcgaatgattgtttcccgaataattccggtacatcagctggatgcttgtcagaatagtctggagtgataagtccgccaatttggagtccatcttgaaagactcgtcacaactggcatgagacaacaaggcaaaatattccttcagatagtcggcgatattctcggaaagagggatgatcggctgttctatcagcttgggataagcgttcccgatagtggtcagcaagttgatatgtccgatacatttcgcagagaatccggcaaaacaaagactaaccttttccgctttctcacggaactgtatgattgttccgggaagtaatgtaatcagatcattcgggtgaacctcgtattccaacagattgatggagactttcatggttccttccgtacagatggcgaaaatacacgcctgcagccggcacgattgtttgtagatgttcagaatatcttcggttactttagtccatgccaacacctccagaggcaaatctacttgtggaacttccattttcataagagtgtttgttatctttggtttagagtgcttgttatattcggtccgcaaatgtacgatttttctttttatttcttacttttgtcctcatgaaaactgtattagtagactggaatttgattccatacgccgaggcatggcagcggcagacggaatggtttgatacccttgtccgcgcaaaagcgcagggagaaccgtatgaaaaccgtattattatgtgcgaacatccgcacgtctatactttgggacgtagcggaaaagaaaataatatgctgttgaatgacgatcagctgaaagccattcaggctacccttttccatatagatcggggaggggatatcacgtatcatggtcccggacagctagtctgttatccgatcttgaatctggaagagtttcatctggggctgaaggaatatgtgcacctgctcgaagaggctgtgatacgtgtctgtgcctcctatggcattgaagcgggacggcttgaaaaggcaacaggtgtctggctggaggggagtacgacccgtgcccgtaagatttgtgcgatcggagtgaggagcagtcactacgtcaccatgcacggactggctctgaatgtgaatacggatttacgctatttcagctatattcatccttgtggctttatagataaaggcgtcacttctcttcgtcaggagctgaagcacgaagtgcctatggacgaagtgaagcaacgcctcgaatgcgagcttagcaaactgctcaatgataaaacttagcggactgcccgaaggaaaagcctagaaaacgattccaatgccgagctgccatgtcttatgcatgaaacagtctttatcagccagtgcataagagaaatctgcgcgaatcggccagaagttgattccgcagcccagtgtaccgtagttgcctgttcctttgtcgttatccccgaagtgatatcctccacggataattccatatttcaggaaattatattccgctccgatgccggcttgaagatggcggtactcggacgggagcaggtaattgaagtcaagagccacctgcaagcggttgtccatactgaacggcaggtcgatggcaccacccagtcccagtcgggcaggcagtttctgtccgtccagcttgctacccaggttggcggcttgaaatccgattgtccatgaagccatttcgtccagaatacccatgctgcgatgatagctggcaccgaggtccacggagactgaccctttgctgtccgcatccttataggcttttgcctgcagatatctgagtgttaatgaaagggacaggtttttggctacatttctaaagtatgcggcttctacgttccatgcgcgggcatgatcttccgcaccgtcctgccaatgaaaatcggcatctttgtagtgacggaatcctacgctaaatccgtgcttcccttcccgtccgatgcggtagaaaagggatgcgctatgtattccaaagtctttatttatgtcagcgtatgagtagctggcacccattacatcctgcgagaaagcgatggtggaagcgttatgaaagatagccgtgcttccattgtcagtgatagccagtcctgtgccggccatacctgccgattgggcatccggagtaatctccagaaaagaggcgcttgccactccctgtgctcccagaaaagtaggcaacagacacgacgcgagaagtaaatgttttactcgtttcataatcatttgttttaagggtgagacatccggacgacacgtatgccgctccatgatttattattgcgaagcatttggctgagaggctcttcgctgacaacaaccttgccaagcgtagaagaggcgtgaagcaaatgcaactttccgtttatatattcggctatccctacatgagctacatccagtcccggaagattcgtggtgatggcgatgatatcaccgtccatgatccacggaagtcctgcgtcggggagttttcctttaggtagccagtgtacctttttcccggacaatgccttttcatgctcggccatccgtttcacgttctccggcgaatccgccagttgcctgtacttttggggatgggtggacatataagagagagacagtttggtggtctgcgtactgttttgtgcagtaacgtcttccagaaatccttggcggacaccgttctcaatccagtcggaggtatagtgcaaccgcgaagtgtatccgtcgatcacaccgtcccgataacgtatcttttgcagattatcggcaaaagaagaccccatcgcctgagccagcgtatattcgacgaaagtaaggcaatctaccgtttggggcaggatgactaacttttcttccgttccctgatccagtgtgttggctacatactttgttccaaggtacgtctttccgattctcaacatcggtgctgtctccttcggaaatacgacaccctcacgcaaccacttttcgagttcctgtgtccattgttgcttatacttgaagttgtcccggaatccccagccatgtccgccggtagggtagacatgaagcgatgcgggaacattgtttttctgtaaagcgagataatagttcactccgttggaaggaggcacggcaccgtcatcagaagacaggacgataaaggcttgcggagtatcggatgtcacttgcagttcgttggagaagagtaccttttgttctgcggtcggatttccgcccagaagctcttttctcgaaccgccatgagtactttgcgtcatggtgaccaccggataaagcagaatctgaaagtcgggacgggatgccgcactgtaatgggtggcaagggtagaggcgagatgtcctccggcggatgctcccatgattcctattttgcggggatggatattccattctccggcatgctcgcgtacgatgcgaatcgctctttccgcatccgataaggggacttcgcaatgaccgttcggcatccggtactttaatacaacgtaagtgatgccctgtccgcagaaccagggtgccatatcgtgtccttcatgatccatggcgaggcggctgtagccacctccgggacacatgatgacagccattccgtttggttgtggtgcacgataaacggttatggtgggggcggtgacattgctgagtctgtggggcgacacttccttttccccgccggtcagcccgttggagttgggagcaccgtcgggccacaaaggtagctcgacgggctgttgtgcaaatgtcattgcagtcataagtgatactataacagataacagtttcctcatcttattttactttcatggaagccttgataaagtagaggatcaataaagcgtaagctcctaatgctaacacttccgaccaggtattgttcagccaggtttcgttgaccagattgataccgccgaaacgcattgccgcgctcacgactcccatcaatgcacctccggcaatgaaaccggatgccagcaacgtacctttttcacctctttccgtattgagtgccgtatccttgctgcggcttgtcacataccagttgacggcaccgcctactaccagcggcacattcagttccaacggaataaacatacccagcgcaaaggccagtgcgggaatcttgaagaatgtcagcacgatagcaaggattgcaccgatgccatacagcagccagggggcacctacgccgctcatcagcggttcgataacggcagccatcgcattggcctgtggtgcagccagtgcaccgctggtgaagccgtatgtcttgttcagtataatcattacaccgcctactgtagcagcagaaacgatggttcccaagaatttccatgtttcctgtttggcaggcgtactacccagccagtaaccgatcttcaagtcggtgatgaaaccgcccgccatagacagtgccgtacatactacgccacccatcacaagtgcggccaccatgcccgaaggacctttcagtccgacagctaccatcactacggaagccagaatcagtgtcatcaatgtcattcccgataccggattggtgcctacaatggcaatcgcattggcagctaccgttgtgaacaggaaggaaatgcctgctaccagcgcaatcgctaccagcgtatggacgatatttccctgcatgatatcgaagtagaagaacagcacgatcagaatcagcgtaaggatagagccgatagcgatgattttcatcgaaaggtcacgctgtgtacgcacgatattcttttctacattgcctttaccgcccatttctttggcagccagtccgacggcactcttgatgattccccacgaacggataataccgatgacacctgccatggcaataccgccgataccgatgctcttggcgtaatacttgaagatttcttcggggctcatcatgcctaccgtagaagtgatttcggggttccatgcgttcagcacgctgtctccccagatggcggacattcccggaatgatgatccaccatactgccagtgatccggcacagatgatggaagcatatttcagtccgacgatatagcccagaccgagtacggcagctcccgtatttactttgaataccagtttcgctttctcagccagcatttctccggctccgcatacgcgggtggtgaagttctcgttccaccagccgaaagtggccacgatgaagtcatacaatccaccgatcattcccgccatcaacagcggtttggcctggctgccgctcttttctccggacaccagaacctgtgtggtagcggttgcttcagggaaaggatatttgccgtgcatatcgctgacgaaatatttgcggaaaggaatcagaaacaggatacccagtacgccacccagcagcgagctgataaatacctgcataaagctgactgtcatctcaggatatttgacttgaaggatataaagggcggggagggtaaagatggctccggcaacgattacaccggaacacgctccgatagactggataattacattttctcctaacgcattttttcttttggctgcaccggagactcctacggcaatgatggctatcggaatagcggcttcgaatacttgccccactttcagccccagataggcggcggctgccgagaaaaggatggccatggcgataccccatgttactgaccagaagtttacttccggataatttttggaaggactcatcaggggattgtacacttctcctgcttttaactctctgaacgcgttctcgggtagtccggtgaatttgtcttcttcttgtttcatattatatttttagtagtttatgcttaatggacttcaaagtaaacaaaaaaaaaggagaatcgaaagattctcctttacgttatgtctattttttcttacttctcgtctttcggggtcatatcgccttcgatatagaggcgtaccatttcggtttttgcgttggtacgcagggtaatcgactttttgaagtgtcccggatatttacctgttccgttgtaagttactttgattgtacctttctttcccggctggatcggttctttggtatattcgggcactgtgcatccgcaagacgctaccgcctgatgaataactaaaggagcgtcaccgatattagtgaaagtgaatacgcagcttactaccggactgttttcagagaattttccaaagtcgtgtgttgttttgtcaaacttgatatcagcgttagtctgggcaaaagcgaaacttactcctaccactaacaaggtcattaaaaaaagtatctttttcatttttccttctttttattgattacaaacgccaaaggtaacgcttttccctgaaactatcccgtcggcagagttaattttatcgaaaaagggaataaaataacttctgtttatcatcgtccttgggcttggcaatcctgaccaccgaggtgaggaacactgagcactgagctggatgagaataagcagcgaggtgaaaaacgctgagcgccgagacgagcagaagtgggcagcgaggtgaatactgccgatctctgttcactaaattaattcatttcaacacgctaatgaatactcatattttttgtttatcgcataaaaaattactatatttggaacaaacccataaaatccagctattatgaaaacaaaacttgatttctatcatatgactcccttttatgagttgaattacttcatagcatttattgttaagttgtacaaacgcattcaacaacgtaaagaacagaaagaacatcgaatcaaagatgaactggtctgattcatttctgttctgaaagtgaatcggcggcgaaattctttcttctctttcttagtaattctatttctttagaatagaattatatactctactcttctctactggttaaggttcggtttccctttcggttaggattcggttttcgagccctgccagaaggcgtttcagagcttttggttttgcaaataaaacactatttcttcaacccgaatcccagcatcatcccgtcgtagttttcagccagtgagctgacagttttcagtgctgtgctgtttgtcttgctgccaaggaatgtcattaatttaagcagcttgtcggagttgaacaataaatccatagagttggaagtgcagttcactttcgcgtgcaggttcagtagtttcaagtactttaagtctacctgcttggtggaagcattgtacgaataagtgccgttcagtttcttttttccgacggtgctggtgaaagtactgtcggcgttgaacgtgaagctcatttgtccttctttgatgcccactttactcaattgctcgttcaatttgttttctgccatcgtggcggctgcggctcctcctgctttcatcagcagattgtccgattcaaattctactgccgaaccgctgtaagtccatgtacctgtcatgtctatcgtttcgggtgttccggtgatggcatttactactttggagatgttgtctttgttgagcagatcctttaatgattgtgcctgactgttgcttgcaaagagtgagaataatgcaacccatgcaataaataaaatgttctttttcattttcgtttacttatttttatagacttctttactgatgttttctatgtagtcgaggatttccgtgcgtcctgtgcggttttccgatgaagatatgaaatacgggggaagttcttcccattccttgctcagttcacgcaggtagttgttgatattcattttcagacgtccgcctttcagtttgtctgctttggtgaagatgatggagaaagggataccgttttcgcccagccattccataaattccaggtctattttctgcggttccaggcgactgtctatcagtacaaacaggttggtcatctgttcccgttcgaggatgtagtcttcgatgatggtacgtatctggtcttttcctttttgtccgcgtctggcgtagccgtatccgggaagatcgaccaggtaccagctttggttgatcaggaagtggttgataagcattgtctttcccggtgtggcggaggtcatcgccagtcctttgcgggcagtcagcatattgataaggctcgactttcctacattcgaccgcccgatgaaggcgtattcgggaaatactcctgtcggacatttcttcacgtccgtgttgctaatcacaaattctgcactcgttatttccattttattgtcatttatttctttgtttttctacttctaataaactctcttatcgtttataataaactatggtcacgtttataataaactccactactttttattataaactccggacgcctgttttcaaggcgttttcgccattttctcttttccggacagcagcatgagccccgcaaaggtaaggcttccgttcaacattagcaattcatagccaaatttatatccggtttctttgtttatccaccagtccagagcgtagcagagcaccggagaggcgatggcgatgagtgggaccagccggtccttagtccggcgccgggtgaacagtccgaaggcgaacatacccagcaagggcccatatgtgtaggaggcgatgatgtagatcgcgtcaatcacgcttttgttgttcagcatctccaccaggcagatgaagaaagccagcaggatggagagggacaggtgtactttctttcttttgcggcgggctgtttcttccgtgtccttgtccgtgttcagcaggtctatacatacgctggtggtcatggcggtcagcgcggagtctgagttgctgaaagctgcggcgatgatgccgatggtgaaaagaaccagtaccgactgtcccagatatccttgtgtggcaaacatgggaaggatatcatcattcatggccggtagttccagttgcatttgtcccgctaatgcgatcagcagaatgcccaggcacaggaacaggaaattcagcgggatgaacgagaatccgtagcagtacatattcttttgggcctcgtgcagattgcggcaggagaggttcttttgcatcatgtcctgatcgagtccggtcatgacgatgacgataaagatgccgctgaagaactgtttgaagaagttctgacgggacatccagtcgtcgaatacgaagatgcggctgtgttcgctgtggcggatggtctgtacgatgccgtcgaagcctacatccagcttctgtatggtgaagtagatgatgaatagcagggctgcgatcaggcagaatgtttgcagggtgtctgtccatacgattgtcttgatgccgcttttgtgggtgtatatccacacgagggccacggagccgacggcaatcacccagaaagggacgtgcatatcctgaaatacgtgcgtatggaggatcagacagacgagatatagtttggctgccgttcccagcatacgggagagcaggaagaagaaagagccggtgcggtaggtatgcacgccgatgcgtgtgccgaggtatccgtagatactcgtcagattcagcctgtaataaagaggcagcaatatgtgtgctacgatcatatagccgaagaagaatccgaatacggtctgcatatacgtcatgtccattccgcgaaccatgcccggcacggatacgaaggtcacgccggaaatagacgcgccaatcatgccgaaggagactatataccagggtgatttgttttctcctttaaagaacgctgcatttgatccgcctttatgtccggtgatgtgggctattaacaacaagcccgcaaaatagcatataataatgactaatatcatcatatcggctgcaaaggtaatactttctttgtattaaaaacaataatccgtatctttgcgcccgaaacagatagaatttcattcgtaatctatgaaccaacaatatccttccgtactgctcgaaaaggcagtaggcgaattttccaaacttccgggcatcgggcgtaagacggctatgcggcttgtattacatctgctccggcaggaaacggctactgtggaggcattcggcaactccatcattacgctgaaacgtgaagtaaagtactgtaaagtatgtcataatatatctgataccgaaacttgtcagatttgtgccaatccgcagcgtgacgcctctaccgtctgtgtggtagagaatatccgcgatgtgatggcggtagaagccacccagcagtatcggggactttatcacgtactgggcggagtgatctctccgatggacggggtagggccgagcgacctgcaaatagaaagtctcgtacagcgggtgtccgaaggaggaatcaaggaagttatcctcgctttgagcacgacaatggaaggagataccaccaacttctacatctaccgtaaactggagaagatgggtgtcaaactcagcgtaatagcacggggcatctccgttggcgacgaactggaatatgccgatgagatcacgctgggacgcagtattgtcaaccggactctttttaccggaaccgtataatctaacttaattatttgaacgaatatcgtaactaacatggaagaacagataaaacgcgcagtgagaaatttgaatatcagttatgttttcttttgggtgcttcccgcctttttgcttggggcaggggagttcgaccttcttcctgtgggagctttggtcgataacccacaggccacctattatatggagacggcaggtatcttgctgaccgccttgtgtgtgccgcttgccttgaaactgttcagtctggtactgaaaaagaagatagacttcctgacgattcctcttgcattgaagcgttatgtgcagtggagcatggtacgcctcggattgctcgaagtggccatcgtcctcaacgtattgtgctattatctgacccttagcaacaccggaaatctctgtatgctgatcgggctgaccgcttcccttttctgtctgcccagcgagaaaagacttcgtaacgaactccatattaataaagaataagccggtatgaaacagtcttttttaagtaatgaccgcatctatcttcgtgcggtagagccggaagatatggatgtgatgtatgagatggagaatgacccttccatgtgggatatcagtaattttaccgttccttattcccgctacgtgctccggcaatatatagagggttcccagtgtgatgtgtttgccgacaagcagttgcgcctgatgataatgagtaagtccgatcatcggatattggggacgattgatatcacggattttgttcctctccactctcgtggtgaggtcggcatagccgttcataaagactatcgccggcaaggttacgcatcggacgctttgcagttgctgtgcgagtatgctttcgatttcttgtcgctgactcaactttatgcccatgtggctacggacaatgaagtctgtatgaaactgtttacttcctgcggtttcgtccagtgcggactgttgaaggattggttacaggtcggtggatgttacaaagatgctgctatcttccagtatctgaatccgaagagacattaattgaaagtcggcacttgcggaaagcgtgaccaggtttcatacttgctgcctagtttctccaaggcttgtttccacatatccttggtgtctccgttcatcagataggcattctcttctttggagacgagccatgtgttctctttgagttcggtgctcagttgttcactttcccagccggagtatcccaggaagaagcggatgtagcggtctactttgtttccttgcagtatgtatttctttatctcatcaaagtcaccgttcagatacagtcctttgctgataggtatggcacccggaatgtctgccagtgtatgaaggtagaacagggtatctgtagcgataggtccgcctttgtataaaggtatattttcgatatacttgaattctttgataatgtcgttgacaaatatcggcagttgtttgttgataatcagccccatgctgccttcttcggtatggtcgatcaacagaactacagatctgccgaatgtggcatcacgaaggaaaggttcggagatgagaatctttcctcgtgatggcaatacattattcgattgaattttaaatatgtcagagtctatattcatgccatcagattgatattcgtgccactaatataagaaaagaaatggaataatagccatactttcccattttttttgttttaagagcagcttttatgaatatccgcatctgacatgaacatcagttccggcataaatacgctattcggctgtcaggcaatcgggtgatgttcggcaaacagcttcattctttcgtcgagctgtgcgtactggtggtctttaataaaagaggtacacgcgcgtaatccttcctggtggcttccggtggtgaccagtgaaatggcgctcactccatagtacatcagttctttggcaagttcgccgcttgtcattcccggatagccgatggtgaagtaaaatccgtcggcaatcggatcgcccaagtcattgtcatataccagatagaatccgtgacggaggaaaatctcttttaacttctgcgctctgtcaccatataccttcacttcgctgaggaagttgtattgaccttcattggcagctttcagcatggcagccatcgcatactgtgcggagtggcttgtgccggaagacagtgcatagagtacgcggtggatgaagaccgtgccgaatgttcccccgccataacgcttcgtcagtccgggatagctgcggtgatacaacttatcggaaatgcagctcacgccgatacgttgtccggcatagctgaaggctttggaaccggaaatcagcaacacataattatctgtgtagtgagctaccgaaggctggaacggagcttgataaggagtgctcagatcctgacggaaatccattgcaaagtatgccaggtcttccagtacgattacgtcatattgggtggcaagttcgccaatgatgcgcaactcttcgtctttcaggcaaatccagctcgggttattggggtttgagtagataatagccgatatatttccttttctcagatagctttccagcttttctttcagcttgtcaccgcggtagtcgtagacatcaaatgtctcatacttttgtcccatcactaccaactgctgtttctgtacgggaaatcccggatcgataaacaggatcgtgtctttcttttcatcgcactggctgcaagtaaggaacgaagcgaatgttccctgcatagagccggtaacgggtacgcatccctccgggcttaaatctacattgatgaatgctttgataaagtcggacgcttcttttttgagttccggcaatccgttgatatcgggatacaggctggcaattccgttttgcagcgcttcgatttccgcttttactcctacggcagaggccggaagtcccggaacacccatttccatcttgataaattcaacgcctgatactgcttccgcctttgaagctatcgctttcacttcacggatagtagccttcgaaaagtcgacaatttgaaactcattaatcgtttcgtcaatcacatttcgttcgattggtgtatttttcattctattttctatttatagtaatgcttgcaaatgtacgtgataattcttaataaacacaccttttcagaaaaaagatactcttgctattgtaggtttcaaaaaaatgtctacctttgcatccgcaatcgagagagatgcgaattaaaaaggaaattttggtgcgttagttcagttggttagaatacatgcctgtcacgcatggggtcacgggttcgagtcccgtacgcaccgcttcttttgatttttataattaggaaaagctctggttcttaacgggatcggagcttttcttattaatcttactgagtgaaaaagcaattgattgggaatatgaatattgagacatgcagaattaactctgctgaaatttaataatttagccaaagttttaaaggagctattttgtcacggctgacaattatcttatctttaaaaggcggctttacatgtaagattgcttttcccagaaaatatgactcaacctttacgatggcattgatgctaactactgtttgccgattgcttcggaaaaaaacatccggatcgagttgttccataagcttgtccaaagaaaggtcaatgataaattctctattttgcttggttacggcaaaggttattttattttctgaataaaaataagcaatgtcttccacttgtaaggtaaaaagtttgtcatcgcctgagattaggaaacgggtacggtatttctttcccggttgggtgatgttttgtaaaatttccattaagtcaattggcttttgcccctgattcaggtatttggtagtcagatgttcgaactttacaattgcttcttccagtcggatgttatcaatcggcttaagtaaataatcgatactgttgactgtaaatgcccgaatggcatattcatcatacgcagtggtgaaaatgatagtactttctggttgtgcctgttcgatgaatgtgaatgaaatgccgtctgtcaattgtatgtcgagaaaaacaagatccggatggggattttccgcaaaccattctacactcttctttacactaccgggtaatactgtaatttgccattcggggcgtaactcatttaatgtattgtttaaccgacgggcggccggaatttcgtcttcaataatgactgctgtaattttattcattcagtactgggattttaacggtaaaataattcgtattgttttctatggtaatatcctgattgcatatcaggaggtaacgggctgaaagattctttaatcccatgccggtgctgaccacattgggctttatcctgattttgttggttaccaatattcttccattctcagaatcataatcgatcaaaatattcattggcatatccatattaattatattatgcttaatgacattttctaccaatagctgcagggttaatgaggggagtttcaaatcataattatcagcttctattctattctctatccggatgcagtctcctaaacggactttatgaagaaaaatataagagtcgatgaaagagagttcggattctatagtaaccagacgctgttgctggctttgtaatatatatcggtatacatcagacaaacgttgggtaaatagaattgcgtttttgggagcatactctatttcggatataagtgtattgagactgttgaagagaaaatgaggattcagctgattttgcaaagctgcatactgtgccttaatggaattctcttcgacttgttccgttctttcgtgcagaagaactagctgcctgtaaaaattgatagtcaaagtaaggttggttattaccatttctaccagccagactaaggctatcattctcagcccggaccctttcagagtaaatggtgcaggaacctcaaatatggctttgactattgacaagaccagataattcattaaaaacagaataattgccgtcagaatgcaatcgataatcaatcgctcttttcgtttgaccagaaactgaaagcttcgcttttgccagttgtggatcattaatactccgaaaccgactagattaaaggcggcaagtatcaggataaatgacttgaaagaaatcagtacttccagatgttgcggggtgaagtcggaataaagcaagagaaacagatatgagaaaaatgccaatcctgagaatagcaaaccaataaacagataattgaacttttgccgcatattgaacgtagactttatatattacaaatttaacaaaaaaacaagaggtcgccaaaagtaactataacattttgtacttcctcttgtctttttgagagaatctagatcatgtcagaaacaaacacctaagcggaatccaatattattatttccatcctgacaaccggtcagcaactcgcttttgttggtggcataactataatatgcagccagatggaaaccaaatcggctttgggaaaacggataaatgttcactccaatttctggagagacatagaacccccagggtttatctgtcagacttatagtgttcagatatgttgtattttgggcatacatggttcctatcttggtgccaacataaggtttcaggcatccattgctgataaatcggtatgaagcggcaagcccgaatggtagctggaaagccgactcttgtcggtcagtagtcaacgaagcagtaccttcagttatggtttgacgcggaacatatttatgatttgtatggaaatcaaggaaagcccccagactccagtgtggagtaaggaaataacctccttccaggttcataccccaaccactgattttatcggcaaaattcgtattgagaggagcattcatctgccagtctacattaaaatgcaatctatcgctgatatcctgtgcataactactgaaataaaacaggcccgatatcatgaatgccagaatatactttttcttcggaataaattttattgttttcataattttgctttttaggatttcttgatataaggagattggtcaaacgcttgattgaccgcatccaacgttagttgcatgttatatttggaattctcaaataatagtccggttgcgtatgaatgccagattaccggtaactttactttctgacttgtatcctcgggatggtctgtcaaatttaccatttccattatcaatgttcctgtattataactataagttacaggatacggataataccagtcgttccaatatggtccccaataaccgggtccccaccagccgttataccatccgcctccataccatccgccggttcctattatttgggttgtttggcgcgtgaaagagagctgtaacccaatgttagcattcttaatcactttaacccttgtataaccacgggtatccatctcatcagcaacctgcttaataatttcttgtgcattctcatccttccaatactccgccttcattccctgtcctatcagtagaatactatcgggcaaacaataagttttgaaatcattgaaattagttttgctgtcataattggtgtaaactgtgaaattattgtcaagcttacttaaatccggatctttttcacacgaagtggcaagtactgccattaatcctataaacagatactttttcatattctttcttttaagtgttaaaccatagttgtttttaatttaatgcctatagtcagctaaaatattttaacttgtttatttactaaacacacattttttaccttagagtgaattgcctttgaatacattggccttagccattgggagtaaacttcctgttaatgaaaagttgtttgaattgaagttcggacttatgtctaccgatgcgttattacttcctttattcaagcggatgttcacctgtgctgatattccgactcccattacgttcatcgaaacggatatattaccttttttgtcggtagtctgcttatatccggatatattcccgttgacagtaatgccgcctagaccgttgggaccgctgatcggaatattgaaggctacctgaaccacagctttattaccttttaccgctacaaaatttgtgttgggagaaacgaaagctgtggtaccatatttaaacataacatgatctgcttccaaaatgaagtttttcatttctatagcttgtttagcttcatcgaaaaacatttggtcgagtaattcttgttcagcttttttttgtttgcgggattcttctttgacagtttgtgcctgaatgtttcccatgctaatgaataatagcaacattgataagattgataactttttcataattgtactttttgagttatactttttcttttctttggttcaaagatagtgcgccgattttattttcttccggttttttttactgaatcgtaaacggcaatttcccaactgtagatatggtgtgctgagtcgtgaaaagtctgtttctggataccattcagcagataattgatgctattcaggtttgccgtttcgttagttggatacatacgtactgctatatcgttgagatctgtattgaggtcggtacaagtgatgtaacgaaattttcttgatagaatcgtgaagagaattaccgatctgttacgactatacccaattgaaaaaaatagtctttgtttccgtttccggaagcaaaaagggattgttttttataagtataatggaaataggtataataaaaagtttcatgtggaaaataatgaagagactttactggaaagggaaagaaggattgagaaaatattgcagggacaaggaagaaaccatattgctttgtataaagtaatcggctgtcggaacataaaaatacgattggattaatgcactcatcagatggtaagagaattggaaataattatgaaacaagagggggaattgctaaaaaataaattttttacgcatgctttgtgctgaaacgaggaaattttacctatttttgtctgtctatttttgaatgctatgatacaggtaatacaattaaaaggaaaagacaaacatttatatcagcttttggcgcctctagtaatggatccggatgtaatacgtgcaaataataactatccgttcaagacaagcgaagattttgtttggtacattgcgattgataacagagatgtgataggctttattccggttgaacagaaaagcgggaaaaaggctgtcattaataattattatgtagctgcggtggacgagaaacgaaaagagatcttgtcgcttctgctatcttctgtagtcacggcatttatacctgcgggttggacgcttaactctgtcacgctgatacaagatcaggaaacttttgagaaattcgagtttgcatctatggacaagaagtggacacgctatgtaaaaatgaacagatgaattatgggaaaaaaaacaatcacaggaacaaaaaatgtatatgaattagcacaagagcgactgaaagtaatatttaacgagtttgataatatttatgtatctttctcgggaggaaaggatagtggggttctgctgaatatgtgtatcgactacatcaggcggaataatctgaaaatacgtttgggagtgtttcacatggactatgagattcaatacaagatgaccatcgactatgtggacaggatactggaggcgaacaaggacatcctggatgtataccgtgtgtgcgtgcctttccgggtatctacgtgtacatctatgtaccagtccttctggcggccctgggaggataacaagaaagatatctgggtacgctccatgcctaagaaggccatgaagaaggaggattttcctttttacaatacgaccatgtgggattatgaattccagatgcgttttgcgcagtggctccatcagaaaaaggatgcggtacgcacctgctgtctgatcggtatccgtacgcaggaaagttttaaccgctggcgatgtatctatatgagccgcaaattccagatgtatcataagtatagatggacttcaaaggtcggaaatgacatctataatgcctatcccatcttcgactggaagacgacggatgtgtggacggcaaacggaaaattccagtgggactataatgtactgtatgacctgtattatcgtgccggagtcaatctggaacgtcaacgggtagcaagcccgttcatcaatgaagcgcaggagagtctggcgctctaccgggtgcttgaccctaacacctgggggaagatgataggacgggtgaatggcgtgaacttcaccggtatgtatggcggtacgcacgctatgggatggcagatggtgaaacttccggaagggtacacctggagggagtttatgtacttcctgctctctaccttgccggaacgggcccgaaaggggtatttgcgtaaactgtctgtcagtgtacatttttggcgaaccaaaggaggctgtctgagtgattccaccattcagaaactgattgatgccaaagtgccgattatcgtgatggacaatagcaactataagacatacaagaagccggtgcgcatggaatatcaggatgatatcgatattccggaatttagggaaataccgacttacaagcgtatgtgtatctgtatcctcaagaatgaccatgcctgcaaatacatgggattctcgccgaccaaagaggagatgagtaagagaagtcaagttatggaacaatatagaatcatagtatcatgagtgtagataaaagtccggtctacgaggtgaaagcagtgcccgtagaaaaagtattagcgaacgattataacccgaatgtcgtagctcctcccgaaatgaagttactggagctttcgatctgggaagacggttttacaatgccttgtgtatgttattacaataaagaggaagataattatatcctcgtagatggttatcaccgatatacggtattgaagacatcgaaacggatttataagcgtgagaacggattgcttccgattgtggtgatcgataaggatttgtccaatcgtatgagctctaccatccggcacaaccgtgcccgtgggatgcataatattgagctgatgtgtaacattgtagcagaattggacagagccggcatgtccgaccagtggattatgaaaaatatcggaatggatcgggatgaactgctgcgtttgaagcagatttcgggactggcggatttgtttgccaaccgggagttcagtatcccggatgaggtggcacctacggagacagaacgtaaaacactctgatttttcacctgtatcatagtatataacatagccctcggatgagattatccgggggcttgttttattatggaatttatttatattaattcacactaaaagtttcgaatgctgaaacttttgtcttttttttattctaatagtgcaaaatgcctgttttactactccttatttttagatttcgcaatattccattcggacgacctctttattagccatataagataactttcattgtctgtatgagaaatgaatgaaattcgcagagtcatgcaatatcccgacatttgcattatgagattttgactgattacagattaaggcttgactgagtaccaatgtcaggtaaatacgaatgtttaatgagattagagggatttaaagtgaatattgggttgttcaaccttttattattagtagctatattatcttgtatggatgatactttcactaataatactactgccaaagggacatttatttcgatcagaggaataggtgttcagagcagtacacatctagtcaatccggaaacgtatgattttgtattttttgccaatgaaccgtataatattcccgtaataaaccaattgaattatattactgcttatgataatctgaatgatattgtgtattcagaacgctattccttgtccgaacaattaattccgatgatacaggaggttaattatcaatacgttgcgtgaaaagatgaagaaaatgatgaaatatataatgaagatatttggtctggtgatcatcttactgatatccgcctgtgagcatgaaacattgttgacgggagagccggatgatccgggagatatttcggaagacaaggtgcggcttgagatttttgcacgggcgaattcataccgcctgccttcgaccagggcactaggggatgaaaatacggtcgaaatgactccctgggtactcgtgttcagagggagtggcacaggggctatttttgtagaagctgtgcaggccttcgagtttgcaggaaagcgatatgtccttttaactaagcggactgatggaagtaagtaccagttgctgatattagctaatccgatggctcagttttattacggaaatgcttctacgggatatgttttcaatgagtcacaacttactgagaagttgattgagggaacaactaccctggctactgcatgtacgaacttgctgacggagccggcaagtacttctcctgcccgcatcccgttcagcggtgtgggtgagacgataccgatgagttatttgctggaagtagataaggtggataatacaacgaagatagaaaagagtgacgggagttcgttgatgcttcttcgggcggttgccaaaatcgtggttgttaatgaagcatcgaactttgaactggaaggagtgtctgctgtggcaaacgttccgcgacaggggcagttgcataaccttatccctgcttctattatgggcaatgctggtaatttgacgaattatcaatacgatgcttcatgctcgttgcctttggtgtcagcagaaacgataaccaataaacaaagtaccgaaaacagtcctatttatatctatgaaaccaatacccagacttatagtacatatctgatcattcagggaatttatgaaactaaaagctattattacaaaatggcgatagtagataaggatctgaactatatgaatatatatcggaatcatgcgtatacttttacaataaagaaagtgcatggacgggggtatgataccgtagcggatgcaaagctttctaaaccgtcgaatacggatctggattttgaaattacagtggacgacagtaattcttatgagattatagctaacaatgattattatctgggtgtgagtaattctgtctttatagcttattctccggatgatgcgagtacttatgaggcttttaaagtgataacggattgtgaaaaagcttttccggatgcgcgtacaataaccgacaatatggccgaagctgataattcgtttgcgctaagcagtcccgctgacggaaaattgcctatagtagcaagcacttctccacgtgtcactccggtcagtgtattgatacaaagctggctgatgtatagtgaagtggggcagagttttgagggaagagataaagtgaatgcatatataacattaaaacttggaaatttggaaaaacaggttcatatcagacgaagagcggctattgatgccggcggtaccatacttaaatacatgcctgccaatagttatccgtttccgacgactggtgaggtggattatcattgccttaccggggaggtggaagatggtactgacaatcctaaggaatggataaaattactgccatcttcgatggtggacagaaatgatacggataaaatcatagtggaagacgggcatatctatattaaaataatgcctaatacggcttcaacaacgagaaacggtatcgtgtatctgacaacaattatgcccggtagtttatatacaggtgaaagtacggtgaagcgtatcaaaattgatatcactcaaaagggtaattaataaacgtaagataaatgaagaaagttagtatactcatagtattggtgctcggatgttttatcgagagtaaagctcagaaagttgcgcttaaaagcaaccttctatatgacgctacgactaccatgaatctcgggctggaattcggactggcacgtaagtggacgctggacgttccggtgaactataatccctggaagccggacaacggaagacgtctgcgccattggggaatacagccggaagtccgctactggttttgtgagaggttcagacgtacgttcatcggagtgcatggacattatgcggacttcaatgtcggtgggttcccggactggtcgtttattagtgagaatatgcagaacagccgctatcagggatatctgtatggcgggggtgtttccgtcggtcattcatggattctgaagaaacgctggagcatcgaagcatcggtaggagtggggtatgcacatattgtatatgacaaatatccgtgcagggcgtgtggtaccaaactgaaagacagcagtaaaaactatttcggtcccaccaaagcgagtgtgtcacttatttacgtaattaaataaagtagaatagaatgatgaacggaagtatacaattcatcgtgtgtgtattggctatcttatgtcagaatataaattcggcagttgcccagacacgctcttatgacggggttatctctgtagtaccggtacagttggaacagcgcggtaaatcggtttatataaatattgacttcgttctggaggatgtaaaggtcaaatcggcacacggagtggattttattccgcaactggttgctcctgcacatacttacaatcttccgaaagtatccatcaagggacataatgaatacctggcgtatgaacgctggctttcattgatgagtgcgaaggagaaggatagctacgaaaaaccttatgtggtggaaaagggtagcaagaaaagaaatgatacgattcgatacagatatatattgccttacgaatcgtggatggacgatgcccgggtggacgtacagcgcgacgaatgcggctgcggtgaaattcagctgatggatgtggaaccacttggggatattgaactggaacgtatattagtaccttacgtggtaacacctttctttgcctatttgcagcctaaagcggaagaagtgaagagccgtgatatacaggcggaatgtttcctcgacttcgaggtgaacaagattagtattcgtccggaatatatgaataacccgaaggagctggctaagatccgtgcgatgattgatgaattgaagtctgatcctagtatcaaggtaaacaaattggatattgtaggctatgcttcacctgaaggatcattggcaaataacaaacgtctgtccgaaggacgtgcgatggcgctacgtgattatctggcatccagatacgatttctcgagaaatcagtattatatcatctttggtggtgaaaactgggatggactggtgaaggcgctggatacgattgattttgaatataaagatgaagcgctgaatattatcaatgatatccctgttgaaaaaggtagggaagctaagttgatgcagcttcgtggcggagtaccttatcgatatatgttgaaatatatattcccaagtcttcgtgtggctatttgtaaggtgaattatgagattaagaactttaatctggacgaagcgaaagagatcataaagacacgtcctcagaatctgagcctgaatgaaatgtttatggttgccaacagctatccgaagggttctcaggaattcatcgatgtgttcgagactgcggtccggatgtatccgaaggatgagatcgccagtattaatgctgccgctgctgctctttcgcgtaatgacttggtatctgcggaacgctatctgaatatggtaaatgtcaataagcagctgcctgagtatagcaatgctatgggtgtattaatgttattaaaaggagagtatgaacatgcggaagaatatttgaaagccgcagccaaatcgggtctgcaagctgccggacagaatttggaggaactggctaagaaaaaaacgaatgcagctgaaatagaaaaaatagaaaatagggataaataaactagttacaaacgcttttattaatttgtaaaaacaatgaagaaaaagaatttttttatgttagcgcttgctgctgtggcttttgctgcttgtagtaacgaagatttagtgccgactgggaatccaggtgatgataatcaattggtgacagacccgacaggagacgcatgggtggcattagctgtaaagactccggtacaaactcgtggattgcataacccgaatcaggaagctgcaacagaggacgaatcaaaaatcactacagtgcgtgccatattctttacggcaaatgcgaatgaggatgctgcaactgtaactgctgacttgacattggataatgacgaagctggtcttgatgccaatggtattcctagtggggctgcaggtaaggcttttaaagtccctgcaacttctaaacgaatattgattattgcgaatccatctcctaaatttgaagcaaagactgctagtgagacagatcaaaaatggcctgttggaacgacttatgcaacagtaaatgcagctcttgacgatacttcggcttctatgacaactgctggtaaatttatgatgtctaacgccaaaggttcgttagaaccttcagatgaagatgaagcttcaggaacatttggtgctcctgtcgatttggctctttatgcaactgagacagcagctactaataatccaatatctatcagaattgaccgtgttgtatcaaaagttcgtgtatatgttactgctgattctgatgcaaaggcaactatttcggatgcgggatgggtgttgaatgctactaacaagacattcttccctgtatctaagagaacgttgacttggaatgagactcctgctaataaacctttaggtgctcgtggtacatgtattactccgtttgaccagtataagatcggttcatacagagttgaccctaactatagtactcaagctttggctaactataatgcttataccagtacttcagctccttcaatttggaatgatcctacaactacggtgaataaagttgctgaatattgtcttgaaaatacgcagactgcaactcataatgtacatgcttatactacacatgtactgttgaaggctaaattcattccgtctgaatatggcagacctgcgccaaatgatggtactccatctacagctcaggaaacagatccgaaacttgtcggtgactggatgttaatcaatggtggcttctatacttttgctacattaatggagtggattgaggcagaattgaaagctaaatatgctgataaagagcctactaccttcccgactgctcgtactactgcgtataatagatatttagctgctgttggtgtaggtgaaattagccttcctgctacagctgatgctacagctattaccagtcttgttgacgattttaaagcaacaaaagctaatgtaggaaatgttgcagctaaagacagagctataactgtaacaggtcttacttattatgtaggtgctgtaagttactacaaaattatgatcaaacatgatgataccagtgctgtaacaaatgaattaggtgaatttggagttgttcgtaactctgtttacgatatcaatgttaagaagtttaacaatccaggatatccggctattccggatccggacgaaggaacgccggatgagagtgacgaaggttggttgtctattgaaattatacctaatccttggacttggtatactcaagaggaaattatgtaattcggaattagtaatagaaatagatttttcaaataaaagttgtgggagaaactctcccacaactttactcccaatattttcaaagttgccgaaaactttttaaaatttcgggatattacttttgatggaatcaataaagtattctatcctctgaattaggaaataacgagaaaagagattatttcttttcctctatatataattgaaaaaaaggaaaatatgaatctaaaaagccttatatgttacgttgccttaggtattctgttgatgagttccgggatagtagcttcatgcgacagctttaatgaagacctgccggaatgccgcttgtcagtgaagttcaagtatgactataacatggagtttgcggatgcgtttcatgctcaggtagataaagtagaactttatgtatttgataagaatgggaaatatctgtttaaacaagctgaagagggaagtgcattgtctaccggcaattatctgatggaagttgaacttcctgtcggacaatatcagtttatggcatgggccggtgcacgtgattcatatgatatcacttcattgacacctggtgtctctactcttacggatttaaaattgaaactaaaacgtgaagcctctctcatcatcaataaaaggatggaaacgctctggtatggtgaagtcatcaatgtcaacttcgatgggaccgtccaccagactgagacgataaatctgatcagagatacaaaaatcgtacgatttgacttccagtcttatacaggcagctggacactggatatgaatgactatgactatgagattatagaatctaatggacatctgggacatgataattcattactggatgatgatgtgttgagtttccgaccttactatatggaacagaaggatcctgcgactgcctatgtagacatgaatacaatgaggctgatggaagaccggaaaactcgtttggtgcttactgaaaaagcatccggaaagagagtgttcgatataaatctgattgattatcttgctatgaccaatgcggagggtaaaaatctgagcacacaagaatatctggatcgacagagcaactatcatataatctttttcttgtctgaatcatggcttgctgtacagattgttgtcaatggatgggtgcatcgcattcaggaagagaatcaatagaatgatctaagaatagtggggaactattattagtgggacaggataaatagtaatatcctgaagggagaacagcccgggtcgataatgatccgggctgtttgtactttagagagtatcaatcactgtacgttgcttttgcaggaactcgatacgctgggcttctccactttctgaaattagtgtggaatgtcgtttcaatgattgaatccagttccgctgtatctgacagatttgcggactttgcgaatccatcgaattgatggaatacacccggagcaaactgacttggtagtcttgtttctctatgtaggtgtaagtcgcttcgaaatcaatgtttgagagatagaaagagacttttcgcccctcactgaattctcccttaacagatagtgtctccatgactgaaagcaattggtagagttcatctttcaggtgtgccacgtcgtcttccgtaatcagattcagacttgcgaaatacttgatctctttgacaaaggaaagaaagatgttgctatcccagataaaataggtcttccgacattgctttacactttcactcagcttattatgcgctttcacgattctgtcttctacctgcatctctgccagtgagttcggtgttttcatttgcccgttctgataaatccatcggcaaaggcggaacttagacatgtattcgtaagatgaataaagagtgaagggaagaagattggaagctgtatatacttccgtcgtatcgtctcctttcacataatcgaatatctgctgataacggctgataatctcataataactttctaaagtgttgggcgaatgcagcaggttcatatcaaaagtaactctattggaaaggtggttacctataatctgatcaatagaaatccccagttttttagacagaagggctacttcgtcgatagtaaaagctacttcaccccgtagtctgcgatagacggcttctttacccatatacaaaatgtctgccagagaattggcaagattttgtcctttggggatccgttctttcattgcagtaatcaactcgtttacaataccatttttcattgtttgttctcttttatatacgttaatactttatgtgatacattctatgcaaaattacggcatgtaaacgagagttttgtgtgggaaaacagttctgaagagtaagagctttttctcatttgatagaatagagatagaaaaagaacgtataatggaaaaaagtaggcaataagcttgtctactttcatgatttggaattataaaattcagttagtttcgattatcgaaattaggaagaactctatagagcatcaatgatttcgcgctgttgattaaagaattggatgcgttgcatctcaccactttctgagatgagtgtagagaatttctttaatgactgaatccattctttcagactttgaaacatctgaacgtcctgtgtagtgagtgaattaatggaataaacacgtatcagactaagttgtagtgtacttgtctcgagataactgtaagtcgcctcgaagttgatttgtgacacataaatatgcacatcattaccaaagtctgtctttccttttatagcaagcctttccaactcatctgtaagtatcagcaattcttctttcagattttgcttcatttcgtctgaaatgagatgtatgtcggaaaaatactgtatatcattgataagatgaagaaaaaccatgctgtcccaaatgtaatcggtagaatgaatatgatgcgaaagtttcgcaaaatcttgctggacattgattatcttttgaggaatctccagttcttcgaaatgtttgcacttaatatgttcattctgatacatccacttgaagaaacggaacttggccagaagttcgtgcttcagatatagtgtctgcggaattacattggaggctgtacctaatgaggcattcggatcttcccgcagcgtatggaataacttgacgtgcttgttgaggaaatcatagtaagtttcgaaggggttgccatgatctactacattgatatcgaacattgcattgttgctgaagctaactccggcaattctgtccagggatatccccagttcttttgaaataatggctgcttcctgaaatgtaaaggggacttcgccacgcagcctccggtagatagcttccttacccatataaagggtatccattaatatatttgccaattgtccttttgcagggaacttttctttggccgcttctatcaggtttgtattaagttcattcattatcataatcctattgaattagtggtttgtttctattaataacacttgacacaggaaagttgtttcggaaactgaaactattttatttttgcttttcttaaaaaatatccacctttaaaattgtatattatgagcaaatcgtttacatttgcctctataaacaagacggggaagttctcttctctgaaaaacaatagttaaaattagaagatgaaaagaatattggtaagtggcggggctggatttataggctcgcatctttgtactcgacttgtaaatgagggacacgacgttatatgtttggataacttctttacaggttctaaggacaatataaagcatttgatgggaaatcatcattttgaagttgtaagacacgacgttacttatccttattctgccgaagtggatgaaatttacaatctggcttgtccggcgtcacccattcattaccaacatgatccgattcaaactgccaaaacatctgtgatgggggctatcaatatgctcggactggcgatgagactggatgccaaaatactgcaagcctccactagcgaagtgtatggtgatccaattattcatcctcagccggaaagctattggggaaatgtgaatccggtaggttatcgctcatgttatgatgaaggaaagagatgtgctgaaaccttgtttatggattactaccgccagaatcagactcgcatcaagatcattcgtatctttaatacttatggtccgagaatgcttcctaatgatggtcgtgtggtctcaaactttatcatacaggcgctgaataatgaagatatcacgatatatggtgatgggaaacagacacgcagttttcagtatatcgatgacctgatagaaggaatggtgcggatgatggatacggaggatgactttacgggtccgataaatattggaaatccgaatgagtttccggttcttgaattggcggaaagagtgatccggatgactggctctacttcgaagatagtttttaaacctctgccgaccgatgatccgaaacagcgtcagccggatataaaactggcaaaagagaaactgggatggcagcctaccgtcgagctggaagatgggctgaagcgtatgattgagtattttaaaaatgtctgatgtaacataaaaaatagaatgatatgaatgtggaaattaatccttccgaatataaggtccttattgtggacgacgtaatttcaaatgtccttctgctgaaggtgcttctgaccaatgagaagttcaatattgtaacagcaggcaatggaactcaggctttggagcaggtgaagaaagaaaaacctgatcttgtgttgctggatgtgatgatgccggatatcagcggtttcgaagtagcccagcaaatgaaggccgatgaagaaatgagcgaaattccagtgatctttcttactgctttgaatagtacggcggatatcgtgaaaggatttcaggtgggcggtaacgattttatttccaaaccgtttaataaagaggaactgattattcgtgtaacgcatcagatctcgttggtggcagccaaacgaattatcatagcacaaacagaagagttgcgcaagactatcataggacgtgataaactctactctgtgattgcacacgacctgcgttcgcctatgggctctattaagatggtgctcaatatgctgattctgaacttaccgagtgaaactatcggctctgaaatgtatgaactgctgacaatggccaatcagacaacagaggatgtattttccttactcgacaacttattgaagtggacgaagagtcagattggtaagctgaaagttgtttaccagaatatcgatatggtagaagtagtggaaggagtgagcgagatctttacaatggtagccgggctgaagaatatccacattgctgtggaaatacctgaagatcgtatggaagtacgtgcggatattgatatgattaagacagttatccgtaacttgataagtaatgcaatcaagttcagtaacgagggatcggaagtcttggtatcactgagagaagaagatagcatggcgatagttagcgtgaaggatagcgggtgtggtattgatgaagaaaatcagaagaaattgttgcataccgatacgcatttcagtactttcggtacaaataatgaagaaggttcaggactcggactgctgctctgtaaggactttgttactaagaacggaggtgagctctggttcacttcgaagaaaggagaaggttctacgttcagtttctcgattccgttgttggaaagctaatataagttcgatataagataaaaacctgtcctgttttctaagcacattactttagagaagtagtgacagctcagaataacaggacaggttttgtttgatagttataaattattctttcagcattttatcgtttacaaatggctttaaaatcacaataagcacatttctttgtatcttctgtctgtgtgaaaggctcattctcatcgaatatttcttttaatagtctttgcagacgttctcggaattcatcttcaaaaaaggcaaagttgttgaccggaatcttcggttggcgtggctctcccatttcaatgacgggcgaatagctttcagaggctgcccgatggatgtagagaagggaaggagctactttcagagactgctgccggctcataatggcagcatacaggaaagtctggaagatatagttgggacgcgtttccgacggagtaaacagttgctcgatgttggcaggcgtcttggggcttcctccggttttatagtctacaatacgcagggtggtgtctttggcatccatacgatcgatggttcctcccaatcggagggtgatcggaccttgaccggtctgaatcgttatcttttcggcaacaggtttttccatggcgaccatttcgaagggggcgtattgcaggtcattcctcagcagttgtttcagataggagacgattactttggagttgatgagttgtacgccattatattcgggcttttcgtctgccggaaccttgaaaagctcttgcttgaaagcgaggtcaacatagttttgtagtttgacttcgttgcgcagcaagcgttccaactcttctttttgtattattttcctgttagcggtcaggtctgtataagctaattgggcggagaggtggaagatggttccgaacaatgcggagtcgatttccgcactgacttcgtccggtgcttttagtctggctacataacggtaatagaatttcagccggcaatcgagataggcgttgagggctgaaggagaaagtatatacgattggggattcgaacagtcataagagcagcgaagtcgttcgaatacttccggagttttctctatgctgatatctgttgtaccttgaggagattgtccggcttcaagatattcgcgggtaatcttgtgaggcccttctacaagcaattgtaacatgaaacgggattcttctccacggttcagcccattggaagaagtgttgtaaagcaaggtgatgttttccgcccgttgtatcagtcggtagaaataataggcatagaccgcatttttgtgttcgatggtggtcataccgaaagctttccggaggttatagggaataaaggaagaatcacctcctgatttaggcaattgtccttcgttgagagagagaaggatgatattgcgaaagtcaaggttacgggtttccagtactcccatgacttgcataccaatggcaggttcaccatggaaaggaatgttggaggcggtcagcactttgctgaccaggcgtcttagtgtgtcggtgcgtacattcagctctccggtttctatcaggctatagagacggttgatggtggtatagctcttgaagagggattcccggtaaagttggttgaagatatcgttgtactcgctttcttcccgatagagaagggagatgtctttgattaattc

SEQ ID NO: 4597 - DNA, 10177 bp, Unknown
  gut microbiota DNA sequence
ggtatatgggtgcttcagtatagcggatacggtttcgtaggtgaaacgtccggtagcggtacggtagccgttcgtttgtaattccatagcggcattaataaagctgtataccggagtttgtgcaagcgggaaacccatcgtgatgttgacgttcttcacttcttgcgggatggagtggagtacgggaagcagcagggcttcgttgcagaggactacggcgttctctttttcttcgttggcagtggaaagagtactttgtacccattccggaagaaagcgggcttgcgcgttctcggtagaagcggagatatagcgtatgttcttcggcttccgtagagtgtcgaaacaactttcgggcaattcattcgggaatcgtttcagattacggttgatgaattctccggcttcgtgtttggctatttgcttggtataaaagagatcgtaatcccagtagaacatggctttatccgcatcttgtaatagctggaagaatttggtctctactttattgagcacgttgaagccgacaaagatgtatttgtcatatttcagtcgggtggtatcgagttgctcgattacattgcgatagagcattccttcgtaggctattccgagttccgctaagttttcacggtagcggtggtagatggtacccagtttgtcccaaagggagataaacttctctttgagtacggtacggcgctcgatagagaagttttggaagaactgttggattgcttcttcctgctctttatcaaggaattcgtaatcgtccatcagattcttcaggtcctgcaagttactgaagagtttgtccgcatctaccaggtttttatctacatcgtcgaaatcgctgatgagcagctcgccccaaaaatagaagtcgtccagtgtttcctgactttctgtttcttcacggaatactttatatagttcgcagaccaaccggatagggtcacccgctttctgtacagataacttccggaacaggtcgctgatactcattgcggcaggagaccagatcggttggtcggattctcctgccagatattcgttgaagaataagttggcacgcttgttagggaagacgagtactgtacgggacagatcgtttcctatcttggtatataaatcatgagcgactagttggagaaatgattgcatatcagttataagttttttctatcttagatatttgtttattgttgcctgaacattacagggattgtgaagcggacggcaactttcgttccgtcatccagttctcccggtttccatttaggcataagaccgacaatacgtaatgcttctttatctaaatatggatctacactacgtaccactttaggttgaataatattcccttctttgtcaacgataaatcgaacgatgacgcgaccttgtcccatgtctccttgggctatttcgggatattctatgtttgcactaatgaatttcattagttcttgtgctcctcccggaaattcgggcatgacagcagctacttctaatacgtcggtaagcgagtctttttcagtaagcgagtcttttactgttattatttcgcctgatataggggtaatctcaattaatcccatgtcttggggtagttcaggtaattcttgtttgtttactgtatctttctctaccataggtatagtatcctctacaggagtcgggcatacttctccaaacattacacttgcattggtagagtcactgatagtttcctgactagtccctttattaggagaactactacatgaagtcattggtgccattgctaccagtccggcagatatacctaatatagttatggcttttccagccatccgtttacgttccagctgttgttccagataacgtacttcggcttcgcacttgggacaagtgcctagacagtcaccttgatattgacactcggaagtaataaactcaatatcattagcttctgctatttgtctgcggatatccttcaatatcctgcaggtttgttttcctcgtttcatggctgacaattattaggtgttttataagtaaaccgatcgaattgggtgattcccatttctttcagtaaacggatgctataatcgacgtcgttctctgtattgtatgcgggaatgacgggggtacgaacaatgatttgttcgttttttccgtgatcaatcaaatattgaagattatgcaggactttttcattgtcttttccggtgtacttttggtatatggcattattaatgtctttgatatcgatgatataagaatcaacaacaggtactagtttctctatattctcttgtgctacattgagtgacgtttctacggaaagctgccattcctgtccacagagttgacggaattcatcaatgaaatcgctctgtaaacaaggttctccgcctccgaatgtaatgcctccgtgagtagcgagaaaatataactcatcctgtttgacttcctcataaagctgcccgcagtcatagtgcttccatatatcttctgagtgtagagattgcggattgaggcaatatttgcagcgcagcgggcaaccatggaaggccactagagtagtgactccctctccatcagtactgagccgatggcggctaattcctatgagcggtgcggctttcattatttcacttttacaattagctcttcatctacgtaccacaggtagccggtgatatttttatatcccatcttagtaagcagttgcatatatccttttacctgtttgttatattggaggttctctttaccgaatttgaagtcaactacaactacttgaccgtctttcatcattacacggtcgggacgtcgggtttgcaacacccctttttctttgtaaatgatggcacattcgttgaacagggtccattcccccgaataccagtcttgaatctccggggaggagaatgcttttcgggctacttcccgtatttcttcggccttttcgctgctggcgatgaccccttcgaaaatgaggcgctcaatagccggatcaatatcttctgctgtttctatggcagaaaatagcgtgtgcagcatacgtccgcgatgaatgaaacggtcatccgattcttcttcctcgatcccctgaatgaaatcggcggagcggttggattgacggaattcaatctcatgacgcatggactccatgtggacaggcaacttatccggcttctgagtcagtttattggtcgaagtttttgctttttcttcttccgaaggacagagttctccttgttcatagcaatcttcctcccagtcgaggccttctttgagggcaactacaggcagtgtattggccaacagttcggacatagttcctttttgtcctttcttgctccagatgatcagattctttccggcacgggtgaaggctacataaagcaggttgagattgtccacccacagttgaagacgttccagcagataatcgttcccatagatggattcggccatttgtgtcgagtaattgatgggaaggatatccatggcattgaacggagcttcctgaggggcacaccataccagttggttattcgtttcattctccagtttccagtcgcagaagggaaggagtactgtatgaaattccaatcctttggatttgtggatggagaagattcggataccttccacttcaccgctgggaatggttttgctgcacagcgtctcatcccagtagcggataaaaccgtcgagctccgaggagttactttgcaaataatccgttacggcatcgaagaaggcaaacagataggcatcctgttcttcaatgtgactcatttcgaagatgctgaatagttcttccagcaattcgtagagaggcataagacggagttctttctgcttttcaagaaatgcgggcggcagatagttttctatcggaaggagcagaagggtgttccagtccagattcttttgcagaacttcgttctgataggctattgccagttgggcccgtgcaattttattgctctcgtcggatagaaatcgcagtgcgtctatcatcatgcagatggcaagagaggcatcgaggcggaaggcttcgtctgatacaattttataatgtaactctttgtcgaagtagtccgcgatgcggggaatgcttttattcttgcgtacaaggatagctatgtcattcagccgtacaccggaagaaagcagatgttccacttcttcaccgagacttatcagtgtctggtctgtatagtcgtgcgcttcgtccggttccaggaaagtggctttgacatatcctttctgtacacttcgcggagattcctgtaccacatcggcataggctttctgaagatcatcgcaatctttgcccaactgttttttgtagacttcgttcaggtaatttacggcagcagtgaatatctggttgttgaaccggatgacattggtctcacttctccggttggtggctaaggtctttaccttgatggggaaatgctcgatgcggtcgttcagaccgttaaggattccccagtcaccgtttcgccagcggtagatggactgtttgacgtctcctactatcaggctgtctgctccttgtgaaagcccttcgagcaggagcagtttgaaattttcccattgcatccggctggtgtcttgaaactcgtcgatcatgacattgcggatgttggttcctatcttttcgaacacgaaagaggaatctccgtccttaaccagttgatggagcagggcattggtatctgataaaaggaaccggttgttgtcatggttcagctgtcgcacttcttcgtcgatattggcgagaagctgtaccttgttgagatgctgcagggaaagccggcaactatttagcaggagattgtttttagaacgcagcttctccgcatcctccagtatctgcatcaggctggatttcgcaagatcaataatatcggcaaaccgtggagatgttttggtagcccagtgtttggcatcttccaggcatttctctacagtggcattgcggatgtcattacttagaatgccattgttcagcttacggaaataactgccgattcctcgtgaaccgttttttagttcatctgcggtaagggcgtgtccttccagttctccttcaaactggtcatagaatcctttcatttgctccaggatttctgtttccaatgctttcagctgcttgcggtattctttgatggtatccggattgcggaggcgctggcggagaccttcacctttttctatatatccttcgtcgaagatgttgcgcccgaaatttttgacttcatccgatacattccagcgtttgtcatcagctattcgttcgttgatgtagtctaacagccatgcgaggacaggagaggtgggacccagtttctcaatcatgctgtccaccgcatcactgagtacttccgcattgttcagttcgatattcagattcggactgagttccagctcacgagccagattgcgcatgacggactggaaaaaagaatcgatggtttctacacggaaacgactgtagtcgtgcagcatatatccgagggcgattcctgcggcttcccgtatttcctgttctgtcctctttgtttcttctttgatgcggttcaggtaggcctcggaatctttgtcgccgatctgaatgccgtatagctgactgaggatacgttccttcatttccgctgttgccttattggtaaaggttacggcgagaatctgtcggtaggcacgtggattcagtatcagcaactttatgtattccactgcaagggtaaaggttttgcctgaacctgccgaggctttatagactaggagttcactcatacttttgatatgaattgtttcatgattgtttgaatatgtcaagcccgaaataaagaataaataaaggtaaatagtcttttagggcaatgcgtaatagctttaaagcctgtccgatacgatagttgacggtttggggagagacgttcagcttttctgcaatttctttatgagtcatccggtgattacgattcatctcatatgcttcccgataatctttgggaagctgtttcagagcattctcataaaggcggaacaactcattttccagataaaagtcaggattgtcgaattctttctcgaatttttctgtaatctcctgatgtacttttcgtctgatctcgaaatgggaaatacggttcagagctttgtttttgacaatagtaaagagaagcgttttcaaagtaagctcttccataagactacagcggttttcccataaccacatcatcgtgtcctgtacaatctcctcaatctcctcctgctcgctgacatattgcgaacaaaaggcgcacaatctacggaaataatacctgtagacagcgtcgaatacatattcttcgcctgctttcaaggcattgatgatagatttattattgttaatatctaggtatataggaggttgttgcattcttcattattttttatgcagagcaaaaataatgaaagcaatgaaagaaacgaaataaaacgggagaaaatatttttttcttttttagtttagtatatttgcgctgccaactgtattaataacagaggtattatatttttttatagtaaaaggatgattgaacatggatgaatctatcttgatgaactacctgaggggaggatgcaatgacgaagaatgtcagcaggtagaactatggtgtgaagaagcaccggaaaaccgacaaatactagagcagctatattataccctttttgtaggcgaccgtatggcagtgatggatgctgtagacacagaagcgtcactgacgaagtttaagtcgctcgtacgtgaaaaggagaaaaaagccaagcgaagaagtatatcggttcgatggggacgttatgcgtccacggcagccgcttttctcgcaggacttgttttcgcaggcggaattgcgtggggattgctttccaataaactttctgattatacagtgatgactaccggtggacagagagcgcaaacagtgcttccggacggtagtaaggtttggctgaatgcatctacgaagcttatttaccgtaactctttctggagtacggatcgtcagattgatttgtcgggcgaggcttactttgaagtggcccgtgacaagcatgctccattcatcgtaaatacgaagcatattaagacttgcgtattgggtacaaagtttaatgtacgggcacgtgaagaagaggacagggtagtaaccactctgttgcaaggttctgtgcggatggaatctccgcgaaccgtcaataatggctatctgctgaaaccgggacaaacgttgaacattaatacaacgacctatcaggctgaattaatagaatatgccgagccgaccgaagttcttctgtggattaacggaaaactgaaattcaagcaacattcattgctggagattacaaatattatggagaaactatatgacttgaagtttgtgtatgatgacgaaagtctgaagaccgaacggtttaccggtgaattctctactgataatcttccggacgaaatattgaatgtattgatgcatacaaatcacttcagctataagaaggaaggacggattattcgattgtctaaaaaataaagaggataaagagaatgttaaaaaaaggtatgtcgcccagcgacatacctttttaagttttattccagccctatttcatctacgaatataaatgccggtcttcctttaccccaatgccatgccggtatgttatattccggacgggctgttattttcacataacgtgcctgcactgtatcgaaagaaagttcatgggtatagatgccattcttatcttccttactgacggcggggtaaacttcggattttacttctttgtactcttttccatcgtttgatacggctacggaaagttcgcgtaaatcaagaatttcttctcctatttctacgtaggtgcgtacccatgctttgcttatcggaatctcctgttgcaggtcaatcactgcttcaaggtcgttctgatagaaggcaatccatcgtccggtacggtaatttctgcttcctgccagtccgtcaatgagtgtattctttccttcgaatttatacttttcattaatgggctgctgcatggtgatcggctgcatggtggctttgttgaatttgatatcctctttcaacactgcactactgccgttgggacggatagtgattgctttcagtgtgcagctttggccgattttcagtgtgtccgtgtatatattggaactggctgtaggttcactgccatcaaatgtatagtagaccggagtattatcaatagtagataagacaacattcaatacgttggcttcggtatcagggatatattgggactttacctggaagatatgtttggcatagttatattgattgatgtcatagacagcgatcagtccgggcaatcgtttcaggaaatccgcatattcttttttctccggcatagtccactgtacttctgataatgcggccatacgggggagttccatatattctacctgactataagtagggatatattccgtccataagttggcttgtatgcctacgatatgcttagcttcttcgggagtgagtatctgaggaaccggttcgtagctatataccttttctaaaggtacataccctccgatagcaggcggttcattgtctgtatccatggtctgatagtaatcgaagtacaggaatgaactgggtgtcatgattgcgtcgtgtttatgcttcactgcttcaattcctccttctatgcctctccatgacatgacagtggcattgggtgccagtcctccttccagtatttcttcccagccaatgatctgacgtcctttgccgttaagaaactgttcagcataattaatgatataactctgaagtctttgttcggctgtgtgatctttatcggcttttagtcccagttccttgatacgtgcctgacatttcgggcatttctcccaacgtaccttcgggcattcatcaccgccgacatgaatatattcggatgggaaaatatctacaatttcattcaggacatcttctataaatgccagtgtcttgtcatttccggcacagagtacgtcttctgatactccccacattttccatacttcataggggccgcccgtgcaacccaattcggggtaagcagcaagcgcagcctgcatatgtcccggaaggtcaatttccggtattactgtgatatggcgttcctgtgcatattttacaatctccctagcttcatcttgtgtataaaaaccgctatagggaatgccgtcatattctccggaattatgtccgatgactgtctccgagcgtttggaaccgatagtggtcaactccggacgttttttgatttcaattctccatccctgatcatcggtcagatgccagtgaagacggttgatattgtgtaaagccatcatatcaataaagcgtttgacagagtcggccgggaagaaatggcgtgaaacatctaaatgtactccgcgataggagaaacgtggatagtcgttgatttcggcagcaggaaggcttatgtctcctttgtttgtaattgggagtgacttccgcaaagtctgtatgccataaaaagttcctgcttctgaagtacctgtgatgattacgttgtcttgggttacttttagttgatatgcttcggcattgtctgcattcagacctgttgctaagattattgtgtttgaagtgactggctcgtcaatgactttcagctttttgccggacatctgatgaatgtattccgccaacagatttgcattttgctgcatttccttgttatctttcggatagacgatggaagtacggtcatttagtacaaagtttccggtcgtaattttgatttcctgaggcagaggaataacttcgtagtttgcctgctgaataactcctgaagaacaggaaaatagtccactgcataaaagaatgactcctaatagatgatgttttttcattttatctaatttatgtttgctaaaggtggattgtagctctatataaaaacaagagcaaacttatacatttttcttgtaagtctgctcttgtccgatatttaattgatggaaaacttattccatacgcttattaccatgcataaatatagaaccttgtgatatctacgcggctgggaacagtaatcatctgatacttcaggtaacgtg

SEQ ID NO: 4598 - DNA, 10235 bp, Unknown
  gut microbiota DNA sequence
agcacagtcttaatcagtgtatcgattgtattcttatatccggtattagcctctttgatcagtcggttggctattaccatacagacggtcattgccttatgtcccatcagtcggctaagtcctgcaagtgccgaactttccatttcgaagttggtaatcttaaagcctttatattcaaatgtttcaatcttatcattttgtttcgggtctgctaacggaatacggagctcacgtccttgtggcccaaagaagcctcctgcggcaatcgttacaccacgtaccatatcttctttagcaatccggtcaatcagttcttcactggcatcaataacataaggcgcaggggcacacatatttcccgaccagcccatgtagttaaggaaagcacgttcgaaaggaagatcgcataccgcattacgtccggcataaaaattcaataatccgtcgaaaccgatagatttctgtgaacagacgaaggtgcctaccggagtatttggctgcaagccgccgcacgtaccgatacgtactaactccagttggcggaacttttctttttcttcccgtgtctcaaagttgatgttggcaagcgcatccagttcgttcataacgatgtcgatattatcgcaaccaattccggtagaaaccactgtgattcgtttacctttatatgtacccgtgattgttttgaattcgcggctttccacttcgcattctttgttttcaaagtgagaagctacgagtgctacacgtcctggatctcctacaaggatcactttatctgccagccattcgggctttacgtgaagatggaataccgagccgtcttcgttgataatcagttcagaggatggaaagtactttttcatgttattgaacggttttagttttacaataagtcgtatatataaatagaaacgccggaaccggattttagttcggaagaggtatctttcttttcttttgcaagtttgtcaaagagaagatacgtagatgaactgaataggaatcaggttccggcgtttggtagactatttactcaaaggctggttggtggtaccaccagtcgttggtttggcaatgttttcgcgcattgaagtatcggcttcgatatttttcatacggtaataatccattatacccagattgccgctacggaaggcctctgccattgctttaggtacttccgcttccgcttcgattactttggcacgtgcttcctgtgccttagctttcatttcctgttcggaagcgacagccattgcacggcgttcttctgctttagcctgtgcgatgttcttgtctgcattagcctggtcaatctgcaaagctgcaccaatgtttttacctatatcgatatccgcgatatcaatagacagaatttcgaaagctgttcctgcatccaatcccttgcggagtacaagtttagagatagaatccggattttcgagtactgacttgtggttttccgaagaaccgatagaggaaacgataccttcacctacacgggcaaggatggtatcttctccggcaccaccgaccagctgcttgatgctggcacgtactgttacacgagctttcgctatcagctggataccgtctttggctactgcagtaacaggaggagtatcaatcactttcgggtttacagacatctgaacagcttcaaacacatcacgtccggcaaggtcgatagcggttgccatctggaatgacagctcaatgttggctttcgatgcggataccagcgcatgtactactttttctacatggcctccggcaaggtagtgggcttccagttcatcacgggtgatgttcttcaatccggctttgtgggcttcgatcatgcccggaacaatgatatacggcggaacattacggatgcgcatcaggaagagttgaatcaacgagatgttaacgcctgatactttagccgacaaccaaaggaagaacggcacataatggaaaaatagtattaggaaaataatacctccaacaatcagaacgataggtaagtacaaagatgtttccattgataatttatattaagtgaatattatattttgtgtttctcaactagaatggtaccgtcagtgatgcggctcacaatgatgggagttttttcattgaggaagccatctatcgatcttacttccacgatgttaccgttaatctcagcataaccgatttgtgccaggcgggtagtgctgattcctgtgtcgcctaccttgacgctcttttccgcactgcggtctactttcgagtcaatatcttttttcaaagccagcttatccagcatcttcgaacgcatgaaccagataagcgagccgatacaggcgacagccgatatccctaaagtgataaatcctcctgccatacccagattggcgaaagcgtaatagttggcatagagaatacaagcaagtgctgaaatgccagccaggctaatccccggaatgacaaacagttcaaccaaaaatagtattactgcagcaatgatgagaacggtgataatcagtatgtccataactctgtattattttgattttgttttttcggcattacgcacacttactccaagagcatccagctcttcattcatttgcagaattcttttttccagatcaaggattgcgggagcaagtttttcttttccttgttgattggcgcttgcatattgctggcgcagaccgttcagtttatcttcctgttgcagataatctttttccagttgccggtaactttggaacagtagctttgctttgggtgatttgaagtcactcaactgataataggtcgtgctatcatcgatgacaaactcgaaatcaaccacacgacgttcctgtggcttatgattgattgcctctttcagacgttgcagtgcctccgttactgtattttcatctttccaagtttccttcagcgaatgaatctgtgccagacggatcatctgttgcgggtccatcgcctcataattataagtctgtttagacgaattaggaatgaacacatagatgcagaccttctcttcgggctggaaacggtcggaggcaaaccaacccagattattgtattcgtcgatgacgtacatataatcattataaggtgaattgaacggcattcccacattttccggcgtcagataagagtccgtatttgtgttgtaacgagtgacaaaaatatcatatcctcccagtccttcgccatcggttgcataataaatagtaacaccatccgataaaacaaacgggtagttggcgtttccggattcgttgatgctgccaggcaacgggcgaccgttgctccattcattcagtaatttatttttggagaatatatccagatttcctctttctcccttttcgctataatagattttattaccgatttctgtttcataaactgttcccggatgatctccttcggtctggaagaattcgttgaatgtaaatagcttgccagactcttcactgatcttgtatgcgctcaggaaatttgctttatctaccacgaaactgtcaataatgcacacgtcttctactcctttgagcatacgcaggtcagctttgctcttttccaatagagcttcagcttcttccgtcgatcttttgcgtttgctgaggtcggcgatatattcttcaaagcagttgactgcatcttcgaaacgataagtatcattgtaagcttgtcccagatagagttgtccaccggctacccgtctttttacagcggtttcgagatacttcacggcttcttccggttctccggttttcaggcagcagacaccgtaccaatagctgtagttaccattggatggttgagatttggcatatttctgaaatacgggtttggcttgttcgtagtcaccttttgtaaataaggtgcgtgcctgttccaatgtttgtgcagatgctcctccaaggaagaaactgcaaattaaaaatagaatatattttcttttcattgttttattcactaatccatgcatcaattgttcaaaagtacaaatttattagaaataaaccctttttcagagattctattatgttaattcttctttaaatcattcttttcgcttacttttgcagccgatttttgaagatatgacacaatttacggaagaagagaagacgatccgccgtattgaacggcgattcaataaaggagtggtgcagtatggactgatagaagaaggggacaaaatccttatcggactgtcgggcgggaaagattcgttggcacttgtagagttgctgggcaagcgggcgcgtatttataagcctcggttttctgtgatagctgtccatgtggtgatgaataatattccttaccaaagtgatactgaatatctgaaagcatattgtgactcttttggagtgccttttgtgcagtacgaaacgtcctttgatcctgctacggatacgcgcaagtctccctgctttctttgttcctggaatcgtcggaaagctctgtttacggttgccaaggagcaaggatgcaataagattgctttaggacatcacatggatgatattttggaaacattgttgatgaacattacttatcagggggcattcagtacgatgccgcctcgcttggtgatgaagaaatttgatatgacaattatccgaccgatgtgtatggtgcacgaggctgatctgattgaactggctgcattgcatgactaccggaaacaagtgaagaattgtccttatgaatcacagtccagccgaagtgatatgaagggtattctgcgacagttggaagcgatgaatccggaagctcgctacagcttgtgggggagcatgacgaatgtgcaggaagaattgttgccggataaaatagactgataattactaattttagtatataataagatgaaaggtttctatacaattttattactcattgtatccaatgtctttatgacctttgcatggtatgggcatttaaagatgaaacaagagtattcttggtttgctgctcttccgttgataggtgtgattacctttagttgggttattgcattttttgaatattcttgtcaaataccggcgaatcgtatcggctttgtcgggaatggcggtccattctcgctgatgcagttgaaagtgattcaagaggtgattactttgattatatttactgtttttaccactgttttctttaagggagaaacattgcactggaaccatctggcagcatttgtttgcctgattgcagctgtttattttgtgtttatgaaataattgtttcagccactctgaaacagaggcttcgtttggcttcaacagaggtgctgttttatataaacggaggctctattcgtatgaaatggagcctccgtttatatgcttatttgcaaagcatttttctatttggcatcaggcatatatcgtttcataccatccgtatagtaagtcttaaactctccattctcgccgctatatataaagtaggcatcgatcataggatttgctttacagaacttttcagcttcttccagtcccattaccataaaagaggtagccaaagcatcagccgtcatacagtcttcggcaatcacagtagaagacaggatactgtgctgtactggataacctgttctggggtcgatggtatgagcatactttttgccatccttataataatagttgcggtagtttcccgaagtagccatacctaaatctgtcaggttgagtactacttgtatatcttgcttaacagctaatgagtcgtcgtacggcttgttaattccgatacgccacagatctcctgtcgcatttttaccttttactactacttcaccacctatatctaccatatagtttttgattcctttccggtcgagcagacgggctattacatctaccgaatagccttttgcaaccgcactgcaacttaacattatatgcggatcttgcttgactacctttccgttctccagcttcactttttcgtaaccggtaatctgtagcaggctgtctatcatcaatgaatctgggaaggcgccttttttaaagccaaatccccaggcattggcaagaggagctatcgttatgtcaaaagctcctttcgtttcgcgggagatttccatggaacgattaaagcaagtctgaaaaaagctgtccgtcactagctcttcattgcgattgatgcgactaatgaccgaactgtcattgaacggtgagagagactggtcgaaacgttttaattccgcttcaatctccggtttcagatcagcgtcatgttgatacgcaatcttgtatactgtgccaaacacaaaaccactggcggtattaaactcagctttttggttacgtctggctaatatccagattgttgccaagatgaggaaggccagccaaaggaaactcttttttgttttcatacgtttttctgtttttttattagaggaaccaatgcttgttattgtaagaatagatgttctatcaatatttttaatccgatagcgaccagaatgatgccaccccataattccgcctttaatttccgtgcacatccacaaccacatttgataccgaagtaaagaccaatgagtgacatgacgaatgatacgaatccgatgataaggataggagagaggatttcggtatagttgttgattccgagcagggcaaaggagatgcctattgccagtgcatcgatacttgtcgctatcgccattgtgaatacgactttcgggcttgcggggttaaatgtctgacggcagtcctcgtttttaaaagattcaagaatcatacgtccgcccaggaaggcaaggatagcgaaagcgatccagtggtctacgctttctatcaggtggctgaaagtctttgcaaacatccatccaatgaatggcatcagagcctgaaaaagtccgaacgccaaagccatgaccagcatcggtctccattgaatacgtttcaaaataataccgcttgcaattgaaacagcgaaacaatccatcgctaagcctattgcaagcagccaaatctctagtcctgtcattattctttaaagaggtaatttgtaaataagggaataggtaattcccatgttatttgatttaaattttccgtagccgggcacataccaagggttggcgtattcattggtcgaagcatttgtcttatatttcatgcgtacagaccagcccatattgaagttcttataaatacgtactttgacacctaccactaattcaaaccactgcatagaccctttcattcctaaatgactgaaaggaacgcttcctccccaatagtcgtcttccagactcggatttccgatgcttcctccccaaatagggtcgtcaaccggcagggttgacacatcatatttgaatgaactgaacgcatagcggagacctacatatagatagctgtttttctcctttttctttgccatcgtgttatagtctacaccaatccggaagaatggggcggtcttacttttgtagtgtattcccgtttcattccatgtatctgttcctcccataccaaactcgatagtcgggatgaacttgtttttaaggttgacgcctatgctgacttcggagctcatgaagtcgccacctagcattttacttccgatgccatatatgtccacaccgacatacgtcccattataaaacgggatagtatcgactacaacctctttcttcttctggtctcttttctgtacaggacccggtcgttgttgttgctgttgtgcaattgacggtaatccaatacaaaagaggagcagcacactactcaatcgtaggaggcgtgcggtcgcgatatctatagaatatttgtaaattctcaatttcatttgtattggcttctttattttgtatatgtagagaatctattctttccgaactgtttttggtatttccaaatttggtactgagaatgttctgcttcatcatatatccgcattccattgattgaaaatacggtgtatttttttgtataatatataatgtatcaacatcttttttgttagtaggactatttggattgtaccagagtataaatacagttgtatcgctggtatagcgtaacggtagcatcagtgtatgtacttttttctggttgttgagaatgatcgagtctgttcccaatgctgtaattgttaatgagtccagtgtgtcgtttactcttctgtcggttatttcgtcaattgtgtacaatgtgcagtacatcatggggcgtcccgccagcgaacaatcgttttcgtccgaacacgaactgccgatgcttatacttgcaccaacaattactactattaaaaagatacgaattaaattcttcataatcggttattgggcgtgaattaaattttcttttctatctgataattgttccgttcgggggcattacgtgagatcagttctcccaggaatccggcaaggaataactgtgtaccgataatcatcgctgtgagcgatagatagaaataaggagaatcggttacaagccggtaggggagaccgttgtacattgcatgcagtttgctgacacctaccatgataacggagatcattccgataaagaacataagcgatcctaataatccgaagaaatgcatcggcttcactccgaatttagacaggaaccaaagagaaatcaaatccagatatccgttgaagaaacggttgaatccgaatttggtagagccatatttacgtgcctggtggtgtaccaccttttcacctatcttctggaatccggcattctttgcaaggtaggggatatagcgatgcatttcgccatatacttcgatatttttcacgacatctttgcgataggctttcagaccgcagttgaagtcgtgcaggtttggaatacctgatactttgcgtgcggtagcattgaataactttgtcggcagtgtctttgatagcggatcatatcttttttgcttccatccggacacaagatcatatccgtcttccgtaatcatccggtataattccggtatttcgtccgggctgtcctgtaagtcggcatccattgtgatcaccacatctccttgtgcttctgcaaatccgcagtagagtgctggcgatttaccgtaattgcggcggaacttgatgccttttacgcagtccgattgggctttgagtttttctattacctcccatgaacggtctgtacttccgtcgttaacgaaaatcacttcgaatgagaatccgttggctttcattacccgttctatccaagcgtagagttcgggcagtgactcttcttcattgaataatgggactacaactgatatattcatttttaataattatgaattacgaattatgattgggccggggtattgttttccggtcgtgctttcttcattaccatcaatccggtaggaatggccagtaaacttccccagaatacatcccatgacaggagttgcatggtgatattgatggaagtaagtgaacgggcagtatctatcgtttcttttattatctcttgattttccatcaaggcaggtgttttagtcatcagttcgtcccatagctggatataggagttgatgataaagccgtggtcaatgaactggaaataggcgtagtgtgcaacggctaccagcagggaagcaaacatatacatgaatatggtaaagagaaccgcatgagagaattggatacttcctccacatattttgtcacgatacatcttcacgtagtgatagccaatgaacggcactgccaacgtcaggattacaaataatagtgaaaggaaagggatgtggaatcccaacggaaataaaatgaacttcaatatccaatagattcccatatacgtgccaaagtgcatggcatatttctgtaaatagcttctgttctctgtcatcttcgttaataaattgcgcacaaaggtacaaataatatcggttggtaaagggaatatggttgttaaagttaataaagcagtaaaagttggcactcgaatattttttttgatttttaattgcttgaaatgtagagtattactttcttttatgcaaaaaagttgcctacagctattgcagaatccataaaaatacctacctttgcaaccgcaaaacgggtaagtcctatacggccagctcccttcgaatcctccagggcttgatcgcagcaaaggtagttggttgtagcggcgcgatatagtaagcttacccacccgcctctttagctcagttggccagagcacgtgatttgtaatctcggggtcgttggttcgaatccgacaagaggc

SEQ ID NO: 4599 - DNA, 13240 bp, Unknown
  gut microbiota DNA sequence
gaataaagtaatcccgaatgcccagtaattaataatccgtgactctgcggtaagtacgtaatcaccagcgagaagccggaagccgtctattttccagatgactacatcatctttcagaactttggcgttagaggtgagcagcctaccgggcattgtcaactcaaattgtatagcatgatagaaaatttcggcgatgttgattttctcttcgcacagggcatccatcatttctttatttgttttataaaggtccgaaaagtatttcgtactgcaagctttatcaaacatgttacagacttcctcgatatcagcgtctcccatactgtcacctttttctgacgaatgtttcttgtaaacagaatttttcaattccttcagacactgcaggcaagcagtatctccttgtaaagaagcgaagtggtggatgacttcccagttgatttcatagatgctgcggttataccattctccgaatttagcttcgagtttatccaatttatcattcatttcgatgccgttcatacctctgaaggcatcatcgtttccctgaagccaaatcatttgctcttccttattcagataattgtcaagaggtacaggacctttgtcctgaagttctttgtaagtggcggtatatatataataggtatagaaccatctgaaactcttctttacccgttccataggtatagccatggcactcagatgctctttacctttgtcaacagtgaagtattctccatctactccggagagtttttggcaggcttttacattcagcttttcttcttcgccccagaagttgaatttaattgtagagtctagatttactaattgccagttggcattcggttgaaacagaaatggattatgtgtcttatctcctgcgatgaaagcggaatcaccttgtgcatagatttctctgtacatacttccgtccctttcaacccgtgaagtcatccgataataggtgctgcaagaagtcatgctaagtaacagtagcatggttattaagaaatagttggttttcatattctgtctattttaatcgtttttttttgatgacttgtaagatttgcatcttccgggatttccggtgttgcgtatattgagaggatagataagtgttcttttccagcagtcgcatttcttcccagttgtcaggtaatggaatgctgtttgaccagttatcatattcattttgcatttctgtccggtgagggacagaagtgaagcaagtgtcattgatgaatagcaggagtaataatgaggcggcaatgccggatgcccatgctcctatgagaaactttctccgtttcctttccggtgagatcccggatattctgttgaggatggtagcggtcagttcctccggattttccaatatcggctggttacttttgacttcggtcagccatttttcatactgtttatcttcttgtttcataagtcgggatctatttgattcattttattacgtatgttctttctggcaaggtacaaggtactttttatcttttcgggcgataatcctgtgataatctgtacttctgctacctccaactcttcgacatcccgaagcgtgaaaacgagtttctgctggggaggcagttcgttggtatatcgcaatatcagttctttcaactgcttgttggaaagagatatctcaatatgatcgtcagaaggaatatttaccgaatcggaaaaggcggattcattatccagcggagaatggcgtaacgaacgcaaacggtcgtaacaggtgttacaggtgattttgtaaagccaggttgacaggcggttttcctgattgtacgttttcagggataaccatacttttacaaatgtttcttgtgttatgtctctggcttcctcttcatcacaaagtaaacggaaagctagtcggaataccagtggctggaattctgaaaccagtagggcgaaggcccttttgtcgtcctgctgacttcggctgaccagttcctgtattttttcctgattcatcattatttattcctgtttactatatgatacgtagcaaaatgcttcaggtcgtttgtaagtcatcaaatatataaaaaaatccccggacaacacattgcccgggggaaagatatctgaaaagagaataaagattatttgattctcttatatccgtatacagccaagtcaccgagttcttcttcgatgcggagcagttggttatatttagccatacggtccgaacggcttaatgaaccggtcttgatctgtccgctattcgtagctactgcgatgtctgcaatcgttgcgtcttccgtttcgccggagcggtgggaagtgacagtcgtatagccatgacggtgagccatttcgatagcgttcagagtttcggtcagcgaaccgatttggtttactttgatcaggatagagtttgcacatcccttctcgatacccattgcgaggaagtcaacgttcgtaacgaacaggtcatcacctaccaactggcagcggtcgccgatacgttcagtcagtttcttccagccttcccagtcgttttcgctcataccgtcttcgatggagtcgattgggaatttgttgatcagttcttccaggtagtcgatctgttcttcggcggtacgtttcttgcctttggcaccttcaaacttggtatagtcgtagataccgtcatggtagaattcggaagaagcgcagtccataccgatcattacgtctttacccggttcgtatccggcagctttgatggctgcgatgatagagttcagagcatcttccgtaccttcgaggttaggagcgaaaccaccttcgtcgcctacggcagtgctgaggccacgatctttcagtactttcttcaaagcgtggaatacttcggcgcccattctcaaaccttctctgaatgagggtgcacctaccggacgaatcatgaattcctggaatgcgataggagcgtcactgtgtgaaccgccattgatgatattcatcatcggtacaggcattacgtatgtatttgttccgccgatatagcgatagagagggagatcaagatagctggctgctgctttggctacagcgagagatacgccaagaatagcgttagcacctagattggacttggttttagtaccgtcgagtgccaacattgcgtagtcgattcctctttggttgagagaagacataccgatcagtttcggagcaatgatcttgtttacattgtccaccgccttttgtacgcctttgccaccgtaacgttgcttgtcaccatcacgaagttcgagtgcttcatgttcacctgtggaagcacctgacggaacagacgcacgtcccatgatacctgattccaatactacgtcaacttctactgtggggttacctcttgaatcgagaatttctcgagctacaattttttctattttcatcgtttctattgttttgaataatatttttgcaaaagtacggacttgacagagagtgggaaatcactataaataggtattctttcgaatcatattccctagatgtcattagtccggtcttattatataacaatgtgacgatgctttttgtttgaatgcggacggatgaaattggcagaattctagtcctcgataataactcccaacagcggaagcaagtccatggcctgcaaggaagtaatgacagctcccttcaggtcgctgatattaagtgttattcctccgatgcgtgaagtacgcaggtcgattccacggagcggagcatgagaaaagtcagcttctaccagatcacaactgtcgaaggcgacggaagagaaacggcagtcattgaaacttccgttccggaaatggcagtgcgagaagcgtacctgattcattttgctcatcgccagattgatgtaagaggcattacaggcatgcaataaaacatgattcatggtcgtctctgaaaggttggttcccagtaatttgcaggaaatgaattctactcggtaaagggagctttctgcaaaagatatattggacaggtcgcagttctcgaaccgtatatctgccagctgagaagaacggaatttacattcgctgaatgtctgattccggaaagtgcagttcttgaaactcttgtaagacttgctgattccctcttctcttcctttgctgaatatgagatttgagacggtttcctctttttcgagcagttcttgcaaggtgcttgtactgacttcctgttcctccatcatgggaggaaccacacggacgggcttggctgcatttcttttgatcatatgatgtagatatgttatgtttattgttttacaagtgaatatcccaagtacagcataatgaatcctacaaacaagctgaggcctacatagagtgagaggtagaagaaattatcgtctttgattaactgaaagttctcattcatgaaggttgaaaaggtggtgaatcctccacagaatcctacggtgagaaacattctcagattggggttcatcagatttccccgttcgaagagtccgtaaaacaggccgatggcgaaacaaccgagtatattgaccagcagtgttcccaaagggaaggaaggtgtcaggaaattctgaacgtaacgcgagatgagataacgcagaacgcctccagtaaaacttcccataccgataaagagtaaagtcttgagcataagctgacaatttaagagttatacattcaaattgtagggatcatcagctccaaagggcggttaaaggctaatcccatagccggtgcaaagatagaaaaaagataaaactatttgcagaaggcttcaaaatctttttcaaattgtttgaaacctccggtgtaaaccttatctatccgttcggaaacaatggatgagtcatctttgttttgaaaggagagtacaaaatcacgtaatatctgccggggaactttctcgatccagaaagtgatgagtgcatgagagaggatataggcgtattgttcgtcggttctttgctgcttcataaattccttttggcgactgttgataaaggtaggcagatcaatgtcccccaacatatatatagtgcggattcttcctttttcgtaatcggtaaacgtgtgctgaagtccttttttattaactttacaatgttcaaaatattcggcaagtccctcgttgaaccatatcggaggacgtcctgccgtgatttgcaaggtgaggtggtggctcagttcgtgatagatgacgcccagaccttgttggtattctttttctctgcttaatatgatggccttttgtaatctggatatatacattccgtttgtacttttgggaggatgtatattgaatttattcagatagatcagggcatcttcccttttgttgaatacagtcaattgaagattaagcgtatcgggaagtccgaattgtgtgtaaaattcgacttcatattggagggcctgttcgatcttccgccgttctttgtccgtaagcgggtcgccttcataagcgattcttacagtctgcgcatggagcaggtcgcaaaggcagatgaaacagaggaaaagataaaatatacgcatattgcttccctttattttgagtatttctgcttctgaaatttctttttttcacgtttgctcatttcaagcatgatcagttcatcatctgtggcggatttataggctgttttctcctccagttttacatcccccttgtctgtgcggaatacaggagtgaagtgagaatatggatagcctaagaacccgtttgcatcgaatttattgttatcaagaaaaaaataagagatggatactccgagtactccggctattccaataggttgcccggtcatgacttcttcacctgtctggatgaagttttgacgcatcataaggtaagcggcaaaggtatggtcggggtggtatatcaacaattgctgtggcagcactgtcgcacaggcgactcctctgcgggttgcatagacggtgtctccttcctgaatttggaatatcatagttttggcagattcctgaggagcgatctgccattgtgtttcttcgccggtctttacaggaagtgcataaggagtactgatccgaaagtctttggggaattgaccgcggaagaacatatacctgcttgaagtcttgaaagaattgctggcattggagcctttctctattctgaataccgtgttctttccggggttcaaattgtatgaacggtcattttcgcggaaaaggtagtaactgcacaggtctccgttgtaatagtttaattctgttcctccttccggagtttgctcccatttcgattcaataatgcgcggaggcatttccattaattttcgcagagactgtgcggagacataaacggtagataatgttgtaagaagtaacaatgtcgtatatctgaagtgctgtgtcataatagtaatattagattatgtgttatgaagtaagatattctgcttgcaaatttatcaattatatgctaatatcatagcatactttgaacttttttgtctctggtattcagattaagatgtaaattctgggataattctatccgaacccatgcggatattgtattttgaactatattgtattccttgtcattgggcggttgttagtgttttatccggctgtcttttctatgatatcctgcttctatttgtatcttttctacctttcatctttatcgttccactagggtgaacaggcctgtttactctagtggtgagaactcttcacaagagtgatgagatctgtgcactggagtggaacgatggttatatcccttcaaaaatacagtattaatagatgatatacatacccctatactatatgttatatacaaagtagcggtagattcttgctccatgtaagcactatattttttctgttggagtactttggtatatgtttcattgacaggtgtttatcagtattgagatattcaaaaacgctatattttaattataatccgaagtgacgcttgctattcctcactacatttgccatatgattattaactaattcatttatatcatgaagaacatgaaaatattaactacggcagtactctgtctgttactctctttttctatgggtgcaacggcaatggcagaaagtatcacttctcctgacggacaattaaaactggatttttcggtcaatgctcagggagaaccggtatacgaactttcttataaaggaaagggagtgattaaaccatcaaagttaggacttgagttgaagaatgatccgggactgatgaatgggtttgcgtgcatcgatgcaaaaacttccaccttcgacgaaacttgggagccggtgtggggagaagtgaaatccattcgcaatcattataatgaaatggcagtcacactgaatcagaaggcgcaggaccggaatatgatcatccgttttcggctttacaatgacggattaggtttccgctatgagttcccgcagcagaagaatctgaattattttgttataaaggaagaacattcacagtttgccatgacgggtgaccatactgccttctggatcccgggagattatgatacccaggaatatgattacacagaatccagactaacggaaatccgtggactgatgaaaggagctattaccaacaatgcttctcaaacgtctttttcaccaacaggcgtacagacatctctgcaaatgaaaacagccgacggtctgtatattaacctgcacgaagccgctttggtggattattcctgtatgcatctcaatcttgatgacaaaaaactgattttcgaatcatggctgacgccggatgcaatgggagataaaggttatatgcagacaccctgtcagtctccgtggcgtacggtgattgtgagcgatgatgcacgtgatatccttgcttccaagctgaccttgaatctgaacgaaccatgtgcttatcaagatgtttcttggattaaaccggtgaagtatatcggtgtgtggtgggagatgattaccggaaaaagcagttgggcatatacagatgatgtttattccgtcaaactcggacagacggattattcaaagacaagccctaacggacgtcatgctgccaacaatgacaaagtaaaacgttatatcgactttgcagcgcaacatggtttcgatcaggtattggtagaaggctggaatgaaggctgggaagattggttcggcaaatcaaaagattatgtgtttgatttcgtcactccctatccggatttcgacgtgaagatgctgaacgcatatgctaaagagaaaggggtgaagctgatgatgcatcatgaaacatctgcctccgtgcgtaactacgaacgccatctcgatacagcctaccaatttatggttgacaacggatataatgccgtgaaaagtggttatgttggcaatatcattcctcggggcgaacatcactatggacaatggatgaacaaccattatctatatgccgtgacgaaagccgccgattataaaatctgtgtgaatgcgcacgaagctgtacgtcctacaggattgtgccgtacttatcccaacctgatcggcaatgaatcggcacggggaacggaatatgaagcttttgccggcaataaaccttttcatactactttgcttccattcactcgtcagatcggcggcccgatggattatacaccgggtattttcgacacgagaatttcttttctggaaggggagcatagcgttgtacgtactactctggcgaaacaactggccctttacgtaacaatgtacagtcctttgcagatggctgccgatctgccggaaagttatgagcgttatccggatgctttccagtttattaaagatgtagctttggactgggatgacagcaaatatctggaagccgaaccgggtgattatattacagtagcccgcaaagcaaaaggaaccaatcattggtttgttggcggcattactgacgaaaactcccgtactgccgcgtttactcttgattttctggaaccggataaagagtatgtagctaccctctatgccgatggaaaagaggctgactacgaaaagaatccgacttcctatcagataaagaaagggatcgtgacgaataaaacgaagatgtccgtcaagctggcacgcagcggtggttttgcattgagtcttatcgaagcaactctatccgatcagaaatcaattaagaaatggaaatgagacgcgactaaaacgattgttcaatcttctttgtatttttaataaaatttagaagtactccgcaaagaaaattaaaactttgcggagtgctttttttatcggatggattcttttttgtacttttgcgccatctttttttaaacattatcaataaagagaacaacatgggaggttttttcggaacagtctcgaaatcgagttgcgtgactgatttattctatggtacagattataactcacatctgggtacaaagcggggcggactcgcgacttatagtcaggagaaaggatttattcgctccattcacaatctggaaagtacatatttccgatccaagtttgaaggagagcttgataaatttaaaggcaatgccggcataggcattatcagcgacacagatgcacaacccattatcatcaattcccacctcggccgcttcgccatcgtcacagttgctaaaatatcgaatatccaggaactggaagaagaccttctcaaccaaaatatgcacttcgccgaacttagttcgagcaataccaatcaaacggaactcatcgcactgcttatcatacaaggaagaaccttcaccgaaggtatcgagaacgtattcaaacatatcaagggttcttgttctatgctgattctgacagaggatggcagcattatcgcggcccgtgaccaatggggacgtactccggtggtgatcgggaaaaaagatggtgcgtatgccgctaccagcgagtcatccagtttcccgaatctggattatgaaatcgaaaagtatctgggaccgggggaaatagtacgcatgtatcccgatcatatcgagcagcttcgccaaccgaatgaaggaatgcagatttgttctttcctttgggtgtattatggtttcccgacctcttgttatgagggcaaaaatgtagaagaagtccgtttcaccagtggaatgaagatgggacagaaggacgaatcggaagtggattgtgcctgtggtattcctgattcgggagtaggtatggcgttgggatatgcggaaggtaaaggagttccttaccatcgtgccatttcaaaatatacaccgacatggcctcgtagcttcacaccgagcaatcaggaaatgcgttcgctggttgcaaagatgaagctaattccgaatcgtgccatgcttcagggaaagcgtctgctgttctgtgatgattcgattgtgcgtggaacacagttgcgtgataatgtgaagattctatatgattatggagcgaaagaggtacatatgcgtatcgcttgccctccgttgatctatgcttgtccgtttgtgggtttctcggcttctaagaatgctttggagttgattacccgtcgtattattaaagaactggaaggtgatgagaataagaatctggagaaatacgccactacggggtctcccgaatacgagaaaatggttagtatcatagccgagcgtttcggactgacttcattgaaattcaacacgcttgagactttgattgaagctatcgggctgccgaaatgtaaagtgtgtacgcattgttttgatggtagcagtcacttttaagtaatatactgagaaaaaagagccgtgaattgtttgtcaattcacggctctttttttacctttacggcactataaactatcaaaatgtaaattgcaaatcattaaatcgtaaaatagatatgactttagtagacagatttttgaagtatgtgagctttgatacacagtcggatgaatcaacagggcttactcccagtactccgaaacagatggtattcgctgaatatctgaagactgaactggaatctttggggttggaagatattactttggatgaacatggctatctttttgccacgcttcctgctaatatagataaagaagtacccactatcgggtttatcgctcatatggatacaagtcccgatatgacaggaaaagatgtaactccacgtattgtaaaaggctacgatgggacggatatagtgctttgtgccgaagaaaatatcattctttctcctgcacaatttccggaactgctcgatcataaaggagaggatttgattgtaacaaacggcaagacgctgcttggtgcggatgataaagcgggaattgccgagatcgtatcggcaatcgtttatctgaaagaacatcccgaaatcaaacatggaaagattcgtatcggtttcaatccggatgaggaaatcggtgaaggtgcgcataagttcgatgtcgggaagtttggctgcgaatgggcgtatacgatggatggtggtgaagtaggggaactggagtttgaaaatttcaatgctgccgctgcaaagattacttttaaaggacgtaatgtacaccccggatatgcaaagaataagatgataaactcgattcgtgtcgctaatcagtttatcgcaatgttgccatcgatggaaacaccggagcagactgaagggtatgaaggattctatcatctgatcagtattcagggagatgtggagcaaagtacagtgtcttatatcattcgcgaccatgaccgtgccaagtttgagaaacgtaaggaagaaataaaacgtctggttgcggagatcaacaccgaatatggagaaggtacggcgtcactagagttacgtgaccaatactataatatgcgtgagaaaatagaaccggtgatgcatatcatcgacacagcttttgcagccatggaggcggtaggagtgaagccgaatgtgaagccgattcgtggcggtacggatggagcgcagctatcattcaaaggtttaccctgcccgaatatttttgccggcggtcttaatttccacggacgttatgagtttgttcctattcagaatatggagaaggcaatgaacgtcattgtgaagattgccgaactagtagcttctaagtgattacattccacgaatatcaatttattacttaaaacttaatacacaaaaaatgaaaaccactccgtttacagagaaacacattgcattaggtgctaaaatgcacgaatttgcaggctataatatgcctatcgagtactctggaattattgatgaacatctgactgtttgtaatgcagtcggggtatttgatgtatcccatatgggagaattctgggtgaaagggccgcaagcgttagcctttcttcagaaggtgacttccaataatgtggcggcacttgttcccggtaagatacaatatacctgcttccctaatgaagaagggggaattgtagatgacttgctggtatattgctatgagccggaaaaatatctgctggtagtgaatgcggccaatatagaaaaggattgggactggtgtgtttctcataatacggagggggcggaactggagaattcttccgataatatggcgcagcttgctgttcagggtccgaaggctattcttgctttgcagaagttgacggatattgatctgtcggctattccttattatacatttaccgttggccggtttgcgggaaaagagaatgtgattatctccaataccggatacaccggtgccggaggttttgaactttatttctatccggatgctgccgaggcggtatggaaagctgtatttgaggcgggggaagaattcggtatcaagccggtagggctgggtgcccgtgatacgcttcgtctggaaatgggattttgcctttatggcaatgatctggatgataagacttcaccgatcgaagctggattgggatggatcactaagtttgtggaaggtaaggagttcatcaaccgtccgatgttggaaaggcagaaggcagaaggaactacccgtaaactagttggttttgaaatgattgaccgaggcattcctcgtcacggctatgaattggtgaatgtggaaggagaaggtataggagtggtgacttccggtacaatgtctcccactcgcaagattggtattggcatgggatatgtgaaaccggaatatgccaaggcaggtacggagatctgtattgatatgcgtggacgtaaattgaaggcaatagtggtgaagccaccttttagaaaataaaaagatttttccattctatag

SEQ ID NO: 4600 - DNA, 38402 bp, Unknown
  gut microbiota DNA sequence
ccgctgtatcggaagcagacaactgattgacatattccttcgggagaactccatattgtgccttgaaacacttggcaaaataagaggaggaagtgaatccaacctgtgccgcaacctcagaaatacgtgtaccgccctgaattaactcagctgccttattcatacggagggccttcagataatcattgggcgacattcccgacaatgcttttatcttccgatagaagttggaacggctcatgttcatctgctctgcaagagtatcgatggagaaattctcgtctgccaactggtcggcaatcacttcctgtatcttggcaacaaactcacaatctctctgagtcatcgcaagttctgccgaggcctgattggcattcccggacaaactggccatcagcttatggaaagactgcctcaaccggagcaggttctcgatctgcttatgcagttgtttgatagagaatggcttctcaatatacacatcggctccgcattccagtccttccaccttagattccagcgtcgtttttgccgtcagtaagatgaccggaatatgtgaatagtcgatttccgatttcactttgctacagagttccagcccgttcatttccggcatcatcacatcactgacgatgacgtctacactctcctgttcgagtatctcaagtgccgcacgaccattcggagctttcagcacacggaaccaggcaaccaacgagtcacgcgtcagattcaacagttcgacattatcttctaccaacaatacggtgaatttctttccggagaactctgaaggaatattctctgccgaaccttcgttttcggaatgaacttcaacgatatcagcagcttcttctaccttcttttcgtttaaaggaagagataatataaacgaggagccttgcggttcgttatcttcaaggcgcaggctgccttgatgggcttctgccagagatttcgcaaaagccagtccgataccggtacctgtggcggtagcgactttatcatccggcatttggtagaaggcttcaaatatctttcccttttgggcatccggtactccacgaccgtcatcactcacatatatctcatatcccgcatcagttgtcacgagtttcaaatcgatacgcgtacgggcatattttatcgcattgcccatcagattcaccagtatcttactcaacttttcccgatcgaccattgataccagttcctgctcgggcagagtcaataccagttcaattccctttaactcggcaggactggtgaactgactatatacatcattcactatttccttaatatcgcaacttaccagattcagttgcaaagctccgttttccatcttctggaagtcgagcagctgattggtaatccctaaaagatagtttacattcttatctattacagacagatacttagcttcttttccttcatgttctatctcttgcaacttttcaagaggcaatcggatcagactgagaggggtacgtatctcatgtaccagattaatgaagaagccgatctttgatttataaacttcctgttctttagcaatctgatatttctccatccgacgtttgtacttatgcttcacgcgaagattccagcgccatgcaatccagacaatccagcccatcaacaggagaatataaataaaataggcgaaagaactacgccaccaagggggagtaatcactacccgcagagtagtcgttttctcgttccactgatggtcattattggagccacgcacttcgaactcgtattctccgggaggcagattggtataagaagcagagttgttctcggagttggtaatccactctttatctactccttttaatatataggaatatctgtttcgtgccgggtcttcatagcttaacgccacaaaacgaatcgtgaaactattattttcataagacaaggttatcttgtcagccatataaatcggtttccccagttgaagcagcttcttcacttcctgttcgtcattcagataggataaacggatatcagtcacatataccggaggaatgtaggaattatccacaaaacgttccggctggaaaacattaaagccgttgattccgccaaaatatagtttaccttcagaagactttaaagaagaacgtgccataaactgatttccctgcaaaccatcattaatcgtaaactgtcggaaatgagctttagaaatcggattaatcttaaatatccctgcattgctggatatccagaaatctcctgtctgatcttgttcaatagaatagatcaccttattgggaagcgcagaatcaaactcaataaatgcctctgttttgggatcgaaggagcataatcctcccccattcgtgccaaaccacatcacgcctttgttatcttcaaataccgtgatcaccgaattactggtaatggtggtcgaatcttcccgttcgtgctggaaatgtttccagtgtccgctcagggtattgtaggagaacacgccgctgttggtcgttgcaatccacaggttgttatacatatcctcatatatatcgcccacggaaatcatggagccgatactggtaatcgtcatgaaattatcggcatcaggattataccggcataagccccagcttgttccaacgaagatttcccctttccggtctttatatatgcatagtacgtcattgctgcaaatggtattggggattccgcgcgagtgtgtatattcctttatcgaaccggtacgcagattaagcacacgtattccttccgcataagtaccgatccaaagacaatcgccgtctaacatcaaagagcgaatatcatatttctgactctttacaccaccgatatgatattccgaaagctcccgtgtaacggtattgaagaaatataagccactctgagtaccaatccagatatttccgtctttattttcacagaatgggcctaccacctctcctgctcccgctatccccgacagataggcgggtgaatagtaatcgaaacgcttggtctgcttggacatatagttgatacctcccaagttcgtcaatacccacagagcaccttccgcatcccacatcatgccgtttatagtctgatcactcagacttcgcggatcagccggattatctgcacggaggaaggttttcgactcgcggttgaatagatagagtccattatcggttcctaccagcagttcattttccgtatatttcagcaggctgcgaactgccccgaagttcaatgaaggagccatgtaattctcaaccgttccggtctgccggttcaatctccccaacaaattgttgcctgctcccagccatacttctccctctacatccagtacacagtttattttgtaactatcggaagagttcacgtccgatgagaccttatatgattgcagaaatttgccgttttcatcgaaacaaagcagtccttcctgtagcgaagaaacatacaccttcttcttatcgtaactctgacagacgtcccagacaaaagaggtctgaatactattctgagtcaacacttcggtcttgggatcataaataaaaagtccctgccctaaggtggcaatccagagaagtccgttctccgtctttacaatcttcttgatttcactgctgacgtatacgccatactgagtagtcttgtcaaaataggagaaacggtccgttgcccggtcatagatatacagtccggagttcgttccaacccatatattctgatcttcttcaatcagtgcctcaacgaaattgttctccaatgagaatttatcgttcaatacattccgataaactttattgccccgaccgtcataacgattcagtccgtcactggtgcccagccagataaatccatagctatcctgtatagcacaccataccgtattatgtgacaagccatcttccacctgatatttcttgaaggagaaatagggagatgcagacaatggttcgagccagaaggccagtaaaagtatcagtatctttgttaacttcataccaagtgtgtcttatgtttagattaacgattcaaccagggttccggattcaacttttctttctctctgcgtaactggaaatgcagtaccgttcgtccgttatccgcgccatcagagaatatctgtccgatagactgcttcgtactcaccgtatcgccggatttcaccgaagcggaagacagattacagtaaacggaaatataattaccatgccggatgaggacgttaaatagtccgttcaactggaacacggctgctaccttaccatcaaagatggcacgggcttgtgctcccggctttccttgtatatcaattcctttattgtccagcttcacattacggagtccttcaacggaatactgtccatagcggctggttatgatataaggtccggatataggcatcggaagtttcccacggttggcaacaaagctaccggacagttcacgatctgccttgctcatcgtaaaagcgtccaatggctccgacttcggtttggcagccgttccggtttcggaggcacctttgtcatttgtatccgccttcttgcgggctgccgcttcgcggcgggcttcttccgcggcacgtttgcgggcacgttctatttcttctgcgatcaaccggtcgatacgggcattcagttgattggcttcccgtctcttcttgttcacttcgctttgcagacctttctgtttcttttgcagattagccaccagtgtgcgcttctctttctcctgagcttccagtttcgccttttcgttctcacgttctttcagcagtccctctttggcggctttcacttgctgacgttctgcttttttcttccgtatctgctcctgcttctttaatatttcctctccctgcagacgctggtaggtggcatattcacgcacataacgcatacgacgatacgtttgtcccaggttcttggcggagaagataaacatcagtttctcttcaatcgatttattcttatagaggtactggacagatgcttcgtacttcttctttttctctttcaggtctttttcaagactattcagctggcggttcaatgacactaattcgcgttcgatagtctccacatcgttattgatcgcaaggatataccgttttcgttcttcaatctgtcccgtcagtgccgccagtccgttcaactgactgcctacgtccttctttgtattctgtaaaatcgactccgtctcggcgatctgcttctgcaaagcaccgcgcttaccttccagctcacgaatcagcttgttcgattgagcagaaagcggaatcgccagccaaaggctgcttaccagaattacaaagagacgttttatcataataaagctaccagcattttcattaattcttccaaagagacctgacggtatctggaagtaacttctgtcggagtgatcgaaagttctttggtcgaaaaatcatagagttgtacttttgctttctccagtttggggattcccaggtctttcccggatagttcagtttttcctccgggtttagaagcgtcagtcagcaatttctccaattgggagaactctacgttcttcgataatatttctttcagctcttttttggttgcgcgtacaaaccgcttgttcatccggtcgacgaataatacttcagtaggagtcacctcgatgcgtgccaattccgtacggagaataggcatcagcaaggaaatctgtacccgttcacggctcttcatcttcatggtaccgcccaccgacatacttccgcctttacccggaatcgtcagctgaagtctggaagccagatagctgggaatagctgcttcggaagcagctacttccggcacctttgtcgccgtcagacgctttgaactcttacaacctaccaatacgactgcaatcaacaaaaaataagcgattcttttcattctgcaatgtattttttcttttctattttctgtttcaatgttttcgactcactgcccatttccagtgctttcttccagtaggtaagcgcgccgtccacatctccggtcatataatagatatctccgcaatgttctacaatcacatcactcttatcgccgccctcacttttcatggcgttatcgatgtaaatacgagcttccgcatagttccccttttcaaagagaatccaggcatacgtatccagataagtggcattgtttggctctgcctttacggtcttatagctcatttcttccgctttatccagatcacgacgctctactgacaggtaataggcatagttgttcagtgcgccaatgttggacggattgtagaccagcgccgagtcataggcagcataagcctccttcatctgcttctgcgtatgatacatatctcccagaatagagtagaaatccgagacgatttctttcttactgtcagccgtcgtatgttccagcgctctcttgcagatgcttatcacactatccggtttctccgcctgattataggcaacagccagataataataaaattccagcgcatccggagtcgcttcaatacccggctcgcagactttgataatctgcttataatcttctttttttaccgcagcaccgatcagcatcatacgggcagctttattggtagggtccaggtcaaccacctgttccaagacggggactgactccgcctccatattcttggacaacagatattgcgcataaagcatcggaatctgaggatcatcctgctcctgcttcatgatccggtcaaacaaagcgatgatctgcgtactgtccttatcggcctgttcattttccacaatcatctgacgcatgacgcccactttggtatcaggagtcaccttcttattcagcaacagtgtatccaactgctgttggtagagttcttcctgccctgtctgtttatagtaagaagccatcgagaagatagccatcggattatcgggttccgcagccagcaccttctgataaacgtcataagcctcctgtttcttaccattctgaagatatacgtctcccaagatgacttgataacgcatgtccatcggatattcctgcaccagactttctatttcctgaaatgctttcttatcatccttcatctggaggtagatacgaaacttctccatggacaactgttcattcttgcccatacgcttttccagacggtttaaagtagagatgacttcatcatacttttcttgtcggccatacaggtccaaaaggttgaaaagcgggtcctgcttggcaggaaaacgtaccaccatctgttccagcagggtgacagccttatccagttcgttctgttgctgatacaaagatgccagtccctgactataccagtagttatccggcgcattcgccacagccttttccagcgcctcttgcccttgcggcacctgacgaaggaacatataatactgcgaaacctcataaagcgcagaagccgcattcggatgaatatccagacaatgctgcaataatccgaaagcggacgcataatccttcttttctttcaggcgcatagcttccagaaagaaataatcatatttccgctgctgttcgggcgttaatgaagactgcgccaaagcgacagctggcttttcccttgtacttttcaccgttccgcacgaaaccaatgtccatacagcaaccaaaagccatatactatttttcttgttcattttctctttttatggtacttatcctcgtcctgtatgtccgaagccccctgctccgcgttctgtttcatccagcacttccacttcctgccataccgcctgctcatgtcttgcgatcaccatctgggcgatacgttccccgtcctcgatcacaaaaggttcggaggaaaggttgaccagaataatgcagacttctccacgatagtccgcatcaatcgttcccggagagttgagcacggtaataccctttttaatggccagtccgctacggggacgaacctgagcttcaaatccttgtggaagagcaatatagattcctgtcggcaccaggcaacgctgcaatggcgccaatgtgataggttcagaaagattagcacggatatccattcctgcagataactcagtggcgtaagccggaagcggatgcttcgatttattgataacttgaacgttcataaatgcacatttactatttaacgggcgaaaatacacattttgaactgaaaattagttaagtttgcagttaaataatgtggtaacaaccaatttgcaaattgtaatcagccaaatagtaaataaaatgatgaattggaagcaactaatatcagccaaacgcttcggaatggaagagtttcacgaagaacggcaagagaaccgttccgagttccaacgggactatgaccgcctcatattttccgcaccgttccgccgcctgcagaacaaaacacaggtattcccgctgcccggtagtattttcgtacacaaccgactgacgcacagcctcgaagtatcttgcgtaggacggtctttgggcaacgatgtagccaaagcaatcctggaacgccaaccggaactggaaagttccttcctgccggaaatcggctcaatcgtatcggccgcctgcctggcacatgacttaggcaatccgcctttcgggcattccggcgaacgggctatctctacgttcttttcagaaggaaaaggacaaaggctacaggaaaagcagccggacggagagcaactttctccgatggaatgggaagatttgacacatttcgaaggaaatgcgaacgctttccgcatcctcactcaccagttcgaaggacgccgcagaggaggattcgtcttaacatattcaacgcttgcctccatcgtaaaataccccttttcatcgagccttgcaggcaaaaaatccaagttcggcttctttgtcagtgaggaagaaagctaccgcaaaatcgcaaccgagctgggactcatccagcttagcgaacaaccgttaaagtatgcgcgacacccgctagtgtatctggtagaagcagcagatgacatctgttatcagatgatggatatcgaagacgcccataaactaaagattatcactacagacgagaccaaggaactgttgatggcgtttttctccgaagaccggcaatcccgtctccgaagtactttccaaatagtcaatgatatcaatgaacagatagcctatctgcgttcttctgttatcggtctgttagtccgcgagtgcacccgtgtctttctggaacacgagcaggaaatactggcaggaactttcgaaggagcgctcatcaagcacatcgccgaaggtccggcagccgcttacaatcattgtgcggaaatatcactgaaaagaatttatcgttcgcaagatgtactggacatcgagctggcaggcttccgtatcatcagcactttgctggaattgatggtagatgccgtcaccttaccgggaaaagaaaaagcttactccgaacttttaaccaaccgcgtttccgaccaatacaatataaaatcgcccgtactctacgaaagaatacaggcggtacttgattatatatctggaatgaccgatgtcttcgcactcgatctttaccggaaaattaatggcaacagccttcctgcggtgtaaccaccttaggagtaaacaccccttcgctctcacaaggcattttcagcgcatccggatgactttctataaacgtctggatgtgccggattcgcttgtcttcaaggatttcatctacagcaatcaggataccggtctcttccacgtcaccaaactcatagttgatagccgtcccgaacatacgcatggtagggcttaaactcatataggcattgaccagcggcgggatattataacccagcttgcgaatctccgtattcaatatcttataatcctctttaaaggtatccttgcagaacaacgttctcagttcctcgtcggaagtttccagaatcagcggttccatcggtgtaaccaactcttcccgatcattaaaatgcttcttaaggaagtacagaatcatgtcgcgtccacgacgatgatagctgggatacatagtcaccttgccaaagaagtacttcacattcggcatcaccactgtcagcgctcccaatccgtcccacagattatccaacgcaaacagacctttactgccggcacgtgtagactgatattccagcgtcacaaaagagcgtcccaactcaatggtctgaggcagatattcctttataaacgcatccgagaaatgaaacatgtgagaagtagccagaatcggagccccagcttcgtcaaagcgcacatccgttccaagcaaataccggtaaccacctaatatttcttccgcctccggattccatacgatcaactgcttatatgggtgttccatcgtgtcgtattcgtcgatatccatcgacaggcccgttcctccacccgcagcacgaaaggcaatttctcttaaacgaccaatttcacgcatcacattaggtgcattctgatgggtaataatataaatctgattattacttttattggtcattcgcaagcgtctatcttccgtcaactctgctttcagcagttctttgctcaccggtttaataatctcttccatattcttgttatagtgttctatcagttacagtttatatacaatgtccttcacatactccgcccactgcgcaggagtcttcgatttatcgaaagtctgccagggaatcggttttccaaaagtgacagtaaaggttttgtggcggttcttaaacatctcgtccgccagatacagcatagcaatattgaatttaatacccagtgccttacaaacattcgccagattgtagaagaaatcagagtttctgccaccaaaatgaacgggaactacgtcccgcttcgcctgtatgctttttataatgaatgtcttcttccattccagatcacggatcactccgttctgacgccgcgagcaaagtcccgcaggaaacatgatcatctggtcgtcggactggaacccggcttccaccatcttgggaaagtcctttgcctgctttcctgtcttattgataggaacacaaagtggggccaaaccgcgaaggttcatcagcaggtcattcaccagatactttactttcccgtcataatggcgccccagcacatagcctagagccactccatcctgtcctcccagcgggtgattggacacaaaggtatacaatccttctttcggcaggttctctatacctttcacctccactttcgcatcaaggaactccatgcatgcttcaaggaaatccactcccagtttatctttcgattcattcaggaacacattaatctcgtcctgatgaactattttcttcagataagaaaccacaaacttagggatgtacttatattgcttcggagctttcgtccgaagtatcttatcgacatcgattaaaaataaagagtcatcagtcattcttttcaaataaaaatgatgccacaaaattaacggttcttttttattaatcgcaataatttgccagaaaatgcaggatttaagtttgcaacttgaaaaaagaacacccaaaaactatcaaataccacctaaaaactatccgcggatagtttttcccctaaattttgtcggttcataccctatctcattatcagaaatgccgtaaacttgcaccatcgaaaaatacaaacgaatattcactttttaaaagcaacgtatatgaaaagtttaagcttcagaaaagatttagtaggagtacaggatgagttactccgcttcgcatacaaactgacaaccgaccgcgaagaagcaaacgatttgttgcaggagacatcactcaaagcattagacaatgaggataaatatatgcccgacacaaatttcaaaggatggatgtataccatcatgcgcaatatctttatcaacaactaccgtaaagtagttcgcgaccagacattcatcgatcagaccgataatctttatcatctgaacctgccgcaagacaccggctttgaaagtacggaaagaacgtacgacctgaaagaaatgcatcgggtagtcaacgcgctcccgaaagaatatagagttccgttcgctatgcacgtttccggcttcaagtaccgcgaaatcgctgaaaagctgaacctcccgctgggcaccgtgaagagccgtatcttcttcacccgccagaaattgcaggaagaactgaaagactttcgctaaacctttaactatattatttatcaattccaagttagatatttttagtgcagatttttaattgtgttagtttaaggcagaagagttaccataccttctgccttttttactaatccctcctatatgacacccggatgtcgagcatactgacacccgggtgttgtacgtcctgacacccgggtgtcatacataccgagacccgggtgtcgtacaaacctccctcgcaaagaaagaaagcctctctttcgataaaaaaaagattcttcctcaatacaaacaaaaaagcgccgcatctttccgttttcgcccactaataaagcatttcccaaaccgcatctttttcaagtaaataagcatttaacaatcggttgaaaacttatctaaaagatttttatggaaaattgtggggaattgtggggaatttcctacttttacactctcttattataataaggtaaatgatacgttttttaggcaatattgaagtcagggcggacgccaaaggaagagtgttcatccccgctactttcaggaagcaactgcaagctgcttccgaagagagacttattatgcgtaaagacgtatttcaggactgcctgacactgtaccccgagagcgtgtggaacgaggagctgaatgagctccgaagcaggctgaacaaatggaatagcaaacaccagctcattttcagacagtttgtgagtgacgtcgaagtagttacgcccgacagcaacggacgcatactgatcccgaagcgttacttacagatttgtaatatccgtggagatatacgctttatcggtatcgacaacaagatagagatatgggccaaagaacgggcagaacaaccgttcatgtcccccgaagagttcggtgcagcattagaagagattatgaacgatgaaaatagacaagatggagaaagatgagttgacataccacgtacccgtactgctaaaggaaagcgttgacggaatgaatattcatccggacggaacgtatgtagacgttaccttcggaggagcagggcattcgcgcgagattctttcacgccttggagaaggcgggcgcctgctgggattcgatcaggacgaggatgccgaacggaatatcgtcaatgatccccacttcacctttgtacgcagcaacttccgctatttgcagaatttcctgcggtatcatgacatcgaacaggtggacgcaatcctcgccgacctcggcgtgtcctcccaccatttcgacgacagcgagcgtggcttctcattccgttttgacggagcgctggatatgcgcatgaacaaacgtgcaggactaaccgccgccgacatcgtcaacacatacgaagaagaacggctcgcaaacatcttctatctgtacggtgaactgaagaacagccgcaaactggcatccgtcatcgtgaaggccagaaacggacagcctatccggactatcggcgagtttctggaaatcatcaagccgcttttcggacgcgaacgggagaagaaagaactggcgaaagtttttcaggcactccgcattgaagtgaatcaggaaatggaagcactgaaagaaatgctggcagcagccaccgaagcgctcaaaccgggggggcgccttgtagtgatcacgtatcactcactggaagaccgcatggtgaagaatataatgaaaacaggaaacgtagaagggaaagcggaaaccgacttctttggaaacctgcaaactccgttccggttggtcaacaataaagtgattgtccccgatgaagcggagatagaaagaaatccacggtcgagaagtgccaaattacgaatcgcagagaagaaataatctcagatatggaagaagaagcagtaaacaaaaaagcagaagagggcaaaaagaaaaaacgtacctcattgaaaagtattctgggaggagatatcctcgccacagactttttccgccggcagacgaagctgttggtgctgattatggtattcatcatcttctacatccataaccgctatgcgagccagcaacaacagatcgagatcgaccggttgaaaaaagaattaatcgacattaaatacgatgcgttgacccgtagttcggagctgatggagaaaagccgtcagtcacgcatcgaagagtatatatcaaacaaagaaagtgatttgcagacctctaccaacccgccttaccttattaaataaggtgtaagtggagagtcttaaaagagaataagcactgtggcagtaaataagaaaaatataatgacccgttacttctttgtcattctgatcatggcactgataggagtagcaattgtcgtcaaggcaggcgtgaccatgtttgccgaacggcagtactggcaggatgtagccgatcgtttcgtaaaagaaaacgtgacggtgaaacctaaccgcggaaacattatttcttctgacggtaaactgatggcaagttcactgcctgaatacagaatctacatggactttatgtccggtgaaaaggacgaaaaaagaagaaagaaggatcaggcacgtcgggattccatcctcaaagccaatatggattcgatttgcatcggactgcataagatattccccgacagaagtgcggcacaattcaaggcacaccttcaaaaaggacgtcaggccaaaagccgtaactacctgatctacccgaagcgtatctcttatatacaatataaagaggtgaaacgtctgcctgtcttctgtctgaaccgctataagggaggattcaaggagttggcatataatcagcgcaagaaacctttcggctcattggcagcccgtaccctgggagatgtatatgccgatacagcccaaggagcaaagaacggtatagaactcgcgttcgatacgattctgaaaggacgtgacgggctgactcaccgccaaaaggtgatgaacaaatacctgaacattgtcgatgtcgccccgatcgacggttgcgacctgatcaccaccatcgatgtaggtatgcaggatatttgcgaaaaagcattggtagacaagctgaaagagctgaacgccaccgtgggtgtagtcgtattgatggaagttgcaaccggagaagtaaaagccatcgtcaatatgacgcaaggcagagacggtgaatattatgaagtacgcaacaatgcaatcagcgatatgctcgaaccgggttctaccttcaagacagcctctatcatggtagctctggaagacggaaaaatcactccggactatatcgtagacaccggcaacggacaaaagccgatgcatggccgtgtcatgaaagaccacaactggcatcgaggcggatacggcaaactgactgttaccgagattttgggagtatcgtccaatgtcggaacttccagcatcatcgagaacttttacggaagcaacccgcagaagtttgtggacggactgaaacggatgagcatcgaccagccactccacctgcaaatatccggagaaggaaagccgaatattcgtggtccgaaagaacgctatttttcaaaaacgactttgccatggatgagcatcggctatgaaacgcaggttccaccgatcaatattctgacattctataatgcaatagccaataacggagtatccatacgtccgaagtttgtaaaagccgccgtcagagacggagaagtgataaaggaatatccgacggaaatcatcaatcccaagatctgttcggacaagacgctggcacaaatacgggaaatcctgcggaaagtggtaggtgaaggacttgccaaaccggcaggaagcaagcagttccatgtgtccggtaagaccggaacagcacaggtttcgcagggagcagccggctacaagacaggaagaaccaattatctcgtcagcttctgcggatacttcccatcggaagagccgaagtacagtatgattgtttcgatccagaaacccggtttgcccgcttcgggaggtttgatggcaggtagcgtattcagcaagatcgcagaaagagtgtatgccaaagacctgcgcttgccactcacaagtgccattgatacgaatacggtagtcatcccgaacgttaaggcaggagaaatgagggaaacgcaacgggtgttggaagaactgaatataaagatacagggaaaaatcaccgattcgggaaaagaagtatggggaagcacccatcccgcccctcaggcggtagttcttgaaagccggggtatcatgcagaacttcgtgccaagcgtcgtaggcatgggagcgaaagatgctgtttatctattggaaagcaaaggattgaaagtcaatctggtgggagtcgggaaagtaaaaagccagtcgatagccaacggcagtgttgcaagaaaagggcagacgattacgcttacgttgcattaagaattaaattaagtaggacagatatgttattaaacgagttactgaaagcaatccagccggtgcaagtgaccggagattcaaggatagagatcaccggagtcaacattgactcccgtctggtagaagccggacagctgtttatggcgatgcgcggcacgcagaccgatggtcacgcctatatccccgctgccattcagaagggagcgactgccatcctctgcgaagatataccggaggaacccgtagcaggaatcacttatatccaagtgaaagacagcgaagatgcagtaggaaagattgcaacgacattctacggtaatccgacttcacaattcgaactggtcggtgtgacgggaacaaatggcaagacaaccatcgccaccttattatataatacattccgctacttcggatataaagtgggattaatctctactgtctgcaactatatcgacgatcagccgattccgacagaacataccacccccgaccctatcacgctcaaccgcttgttggggcaaatggcggacgaaggatgcaagtacgtctttatggaagtcagttcacattccatcgctcaaaaacgtatcagcggattaaagtttgcgggaggtatcttcacgaatctgacgcgcgatcatctggattatcacaaaacggtagagaactatctgaaggcaaagaaaaagttctttgacgatatgcctaaaaacgctttcagcctcaccaaccttgacgataagaacgggctggtgatgacacaaaatacacgttccaaggtctacacctattcattaagaagcctcagcgacttcaaaggccgggtcatagaatcccattttgaaggaatgctgctcgatttcaataatcatgagctggccgttcagtttatcggcaagttcaatgcatccaatctgttggcggtatttggagcagccgtattattgggcaaaaaagaggaagatgtacttcttgcgctcagtacgctccatccggtagccggacgtttcgatgccatccgttctccgaaaggggtaacggccatcgttgactatgcacatactccggacgcgttggtgaatgtattgaacgccattcatggagtactcgaaggcaaaggaaaagtgatcaccgtagtaggtgccggcggcaaccgcgataaggggaaacgccccatcatggcaaaggaagcagcgaaagccagtgaccgggtgattatcacatcggacaatccgcgttttgaagagccacaggagattatcaacgatatgcttgccggactggatgcggaagatatgagaaaaacgctcagcatcgccgaccggaaagaagcgatccgcacggcttgcatgcttgcagaaaaaggagacgtgatactcgttgccggaaaagggcacgaaaactatcaggaaatcaaaggagtgaaacaccactttgacgacaaggaagttttgaaggaaatatttaattgacaacatataattatttgcaatagacagcatcttatcaagcgtggggcaacaatgagaaactgtaaattgcaggctataaattgtaaatagaaaagagatgttatactatctgtttgaatggctgcacaagcttaattttcccggagcgggaatgttcggttacacctcattccgtgctttgatggctgttatcctcgcattgcttatatcgagtatatggggagacaaattcatcaatctgcttaaaaagaagcaaatcacggaaacacagcgtgacgccaagaccgacccgttcggtgtcaacaaagtaggcgtaccaagcatgggaggtgtcatcatcattgtagccatccttataccttgcctgctattgggtaagctggataatatatacatgatattgatgctgatcaccactgtatggctgggatcactcggttttgccgacgactatatcaaaatattcaagaaagacaaggaaggcttgcacggtaagttcaaaatcatcggtcaggtgggtctggggctgattgtaggcttaaccctgtatctgagtccggatgtagttatccgcgaaaacatcgaggttcatacaccgggacaggaaatggaagtgattcacggaaccaatgatttaaaatctacccaaaccactattcctttctttaaaagtaacaacttagattatgccgacctggtgggctttatgggcgaacatgcacagacagccggatggttcctgttcgtgatcattacgatcttcgttgtaaccgccgtttcgaacggggctaacctgaatgacggcatggacggtatggcagccggaaactccgccattatcggtgccacgctgggaatactggcgtacgtatcgtcacacatcgaatttgccagctatctgaatatcatgtacattccgggatcggaagaactggtaatctacatttgtgcctttatcggtgcattgatcggtttcttatggtacaacgcctatccggcacaagtattcatgggagacacaggcagcctgaccattggtggtatcattgccgtatttgccattatcatccacaaagaattgctgataccgattctctgcggtgtatttctggtagagaatctgtcagtcatactgcaacgcttctactataagataggtaagcggaagggagtaaaacagcggttgttcaaacgaactcctatacacgatcatttccgtacttcgatgagtctggtagaaccgggatgtacggtgaagttcacgaagcccgaccagctgttccacgaatcaaagattaccgtccgtttctggattgtaacgattgtactggcagcgataacgattattacattaaaaatacgatgagaacaaacagactgcccaatgcaggatatttgtaacattaatatagttgagagtattaacccgattattaactttaaaaagatgtgcgcagccgacgagcgaaaaaggaaggatgaaaaggaagagagaagcgtctgcctgtcggacagcaatagcacattactgtaaatgaaaagaattgtaattttaggagccggtgaaagcggcgctggtgcagccgtactcgccaaagtaaaaggatttgaaacatttgtttcggatatgtccgctatcaaggataagtataaggaccttctggacagccaccatattgcctgggaggaaggacatcataccgaagaactcattctgaatgccgatgaggtgattaaaagccccggtatcccgaatgacgccccgctgatcctgaaactgaaagcccaaggcacaccggttatctccgaaatcgagtttgccggacgctataccgatgcaaaaatgatctgcatcaccggttctaacggaaagacaacgactacttccctgatctaccacatctttaagagtgcagatctgaatgtaggactggccggaaatatcggcaagagtctggctttgcaagtagccgaagagcatcatgactattatatcatcgaactcagctctttccaactggacaatatgtataacttccgtgccaatatcgccgtactgatgaatatcactccggaccatttggaccgatacgaccattgtatgcagaactacatcgatgccaaattccgtattacgcagaaccagacaacggacgacgctttcatcttctggaacgatgacccgatcatcaaacaggaactggcaaagcacggtctgaaagctcatctgtatcctttcgcagccgtgaaggaagacggagccatcgcatacgtagaagaccacgaagtgaagataaccgagcccatcgccttcaacatggaacaggaggaactggcactgaccggacagcacaatctttacaactcgctggctgccggtatctcggcaaacctggcaggtatcactaaagaaaatatccgcaaggcgctctccgacttcaagggagtggaacatcgcctggagaaagtggcgcgcgtacgtggtatcgacttcatcaatgactcaaaagcgaccaatgtcaactcttgctggtatgccctgcaaagcatgaccaccaagacagtactgatactgggcggcaaagacaaaggcaacgactatacggaaatagaagacctggtacgtgaaaagtgctcggcactggtttatctgggactgcacaacgaaaagttgcacgactttttcgaccgtttcggactgcccgtagccgatgtgcagaccggaatgaaggatgcagtagaagcagcctacaaactggcaaagaaaggagaaaccgtattgttaagcccctgctgcgcctcattcgacctcttcaagagttacgaagaccgcggcgatcagtttaagaaatatgtaagagaattataaaatggatttattaaagagcatatttaaaggcgacaaggtaatctggattatcttcctctgtctctgcctcatctcgattatcgaggtgttttcggcagcatcgacgctgacgtacaaaagcggcgaccactggggaccgataacacagcattctatcatcctgatggtaggtgccgtagtagtggtatttctgcataacgtcccctacaaatggttccaggtattccccgtcttcctgtatccgatttccctcgttctactggcattcgtcacgctgatgggtatcattacaggcgaccgtgtcaatggggcagcccgctggatgacctttatgggactgcaattccagccttcggaactggcaaagatggctgtcatcattgccgtttcgttcatcctgtccaagagacaggatgaagaaggagccaaccccaatgcctttaaatacatcatgatccttaccggactggttctcgtactgattgctccggaaaacctgtcgacagccatgttgctgttcggcgtcgtattcatgatgatgttcatcgggcgggtggcggcaaagaaactccttctgctggcaggaggacttgtgctgattgtcgcactcggtgtaggtacagtagttgccatccctgccaaaacgctgcacagcactcccggacttcaccgtctggagacttggcagaaccgtatcaaaggtttcttcgataaagacgaagtgcccgcagccaaattcgatatagacaaagacgcacagatcgcccatgcccgaattgccatcgctaccagtcacgtagtgggcaaaggaccgggaaattccatacagcgtgacttcctcagtcaggcattctccgactttatctttgcgattgtcatcgaagaaatgggattgataggaggtatatttgtcgtattcctctatctctgtctgctgatgcgggccggacgtatcgcgcaaaaatgcgaacggaccttccccgccttccttgtcatgggtatcgctttgctgctggtatcgcaggcgatactgaatatgatggttgccgtgggactgttccccgtaacaggacagcctctgcctttggtcagcaagggaggtacaagtacattgatcaactgcgcttatatcggaatgatattaagcgtgagccgatatactgctcatctggaagaacagaaagcccatgatgcacagattcagatgcagatagaagccggtacagctccttcggaagcacaaatcgttgctgaacctactgcacagattctgaacagcgatgccaagtttgaggatgaacacgatagcagtaaacgagggtgaacggacagaaaaaaggattattatggaaaaagaacttagaattatcatcagcggtggaggcacaggagggcatatcttccctgccgtatctatcgccaacgctataatagaactgcgaccggacgcgaaaatcttatttgtgggcgccgaaggccgtatggagatgcagcgggttcccgacgcaggctataagattatcgggctgccgatagccggtttcgaccgcaaacatttatggaaaaacgtatccgtactgatcaaactggcacgcagccagtggaaagcacgcagcatcatcaaaaacttccgcccgcaagtagcggtaggcgtaggaggatacgccagcggaccgacactcaaaactgccggaatgatgggagtgccgactctgattcaggaacagaactcgtatgccggagtcacgaataagctgctggcacaaaaagcaaaggttatttgtgttgcatacgatggaatggaaaagttctttcctgccgataagattataatgaccggaaatcccgttcgccagaatctgacgaaggatatgccggaaaaaggcgcggcactacgttccttcaatctgcttccggataagaagacaatcctgattgtaggcggcagcctcggcgcacgtaccattaataatacgctgaccgcagcattagccacaattagagaaaacaacgatatacagttcatctggcagaccggaaaatattactatccgcaggtgacagaagccgtacgggcagcaggagaacttccgaatctgtacgtgacggacttcatcaaggatatggcagccgcttacgcggcttccgacctagtgatttcacgtgcgggagccggttctatttcagagttttgtctgttgcacaagcctgtggttctggttccttcgcccaatgtggcagaagatcatcagaccaagaatgcactggcactggtagacaaacaagccgccatctacgtaaaagacagcgaagcagaagcaaagttgatggacgtagccctgaacacagtagctgacgaccggaaactgaaagaactaagtgagaatatagccaagttggctttgcccgactctgcacgaatcatcgcgcaggaagtaatcaagctggcagaagcagaaaactagttgaggtaatgcaaaaatcgcaactatcccaattaggattgactaaaaagtcagtagaatcctaaatggggctgactaaaaagtcagtactatctccaatctcctccttctggaaggaggagtacccgcagggggaggtggtaggaaaaaagatggatataccttatttcacctaccaccccggtctaaagaccacccctccttcctaaaggaggggaattaaaggtagtaccgactctgattaaaacttgaaatgttacttggaacaagaattataaaaagaaacagtataaagaaatgaatattgaaacgatcaaatcagtctactttgtcggtgccggaggcatcggtatgagtgcgcttgtccgctatttcctttccaaaggaaaagtggtagccggatacgaccgcaccccgactccattgactgaaaacctcatcgccgaaggcgcacaaatacattacgaagaaaacgtacgactgattccggaagcctgcaaagacaaagaaagcactttagtcgtattgacccccgccgttccgcaggaacacgaagaattggtttatttccgcaacaacggattcgaaatacaaaaacgcgcgcaagtactgggaacgatcactcattccagcaaaggtctgtgtgtagccggcactcatggcaagacgaccacttctaccatgaccgcccacctattccaccaatcgcacatagaatgtaccgctttcctcggaggcatctccaagaattacggcaccaatctgctactctctcagaaaagcccttataccgtcatcgaagcagacgagttcgaccgctctttccattggctgtccccttatatgtctgtcatcactgccacagaccccgatcatctggacatctacggaacagaaaaggcatacctcgaaagcttcgaacattatacaacactgatccagccgggcggtgcactgattatccgcaaaggtatctcactacaaccgaaagtacaggccggagtccgtgtctatacctattcgcgtgacgaaggagacttccacgccgagaatatccgcatcggaaacggtgaaatcttcatcgacttcgttgcccccgacacacgtatcaacaatatccaactgggagttccggtaagcattaacatcgagaatggtgtagccgccatggcactcgcccacctcaacggagtgaccgacgaagagatcagacaaggaatgaacagcttccgcggtgtagaccgccggttcgatttcaagatcaagaatgaccaggtagtctttctgagcgactacgcccatcatccctctgaaatcaaacagagcgtgctgtctatccgcgaactctataaagacaagaagatcacagccatcttccagccgcacctgtacacccgtacccgcgacttctatcaggactttgccgatagcctgtcgctactggacgaagtcattctggtagacatctatccggcccgtgagacaccgatccccggtgtcaccagcaagctgatatacgacaacctccgtccgggcatcgaaaaaagcatgtgcaaaaaggaagaaatactgaacattctgaaagataaaaacattgaagtattaataactctgggagccggagacatagacaattatgtccccgaaataaagaaagaactggaaaaaatgaagaacgaagagcgaagaacgaagaactaagaatttctacgctacatcatacagtcgcgcagccaattctcaattcttcattttcaattttcaattctcaattaaataaaaactatggtaaagagaatccttctatctatcgtcatgttgatgcttatcgcctacctcggcatggccatcaccgctttcaaccgcaagcctgccgaccagacctgccgtgacgtagaactggtcatcaaggataccacttatgccggcttcatcaccaaagaagaggtgaaaggcatcctccagcataaaggtatctaccctatcgggaaaaagatggagcgcatctctaccaagtcgctggaacgggaactgagcaagcatccgctgatcgacgaagcggaatgctacaaaacacccagcggcaaagtctgcgtagaagtgacacaacgtataccgatattacgcatcatgagtgccaacggagagaattattaccttgataataaaggaaccgtcatgccgccggaagcaaaatgcgtcgcacatcgggcaattgtcaccggaaacgtagaaaagtcgtttgcaatgaaggatttatataagtttggtgtatttttgcaaaacaataagttctgggacgcccagatagaacaaatccatgtgttgcccgaccgcaacatcgaactggtacctcgtgtaggcgaccacctcgtctatctcggcaaacttgaaaactttgaaaacaaactggcacgcctgaaagaattctaccaaaaaggactcaatcaggtaggctggaacaaatattcacgcatcagtcttgaattcagcaaccagattatctgtacgaagagagagagtaataagtaataggtaataggtaacaggtgatgggatgaagttctcaaaatagaaagttgaaaataattaaattataaataaagagatggcaacaacagaatttatcgccgctattgaacttggttcatcgaagataaccggtgtggccggaagaaagaacagtgacggaagcatgcagatactggcatacgcccaggaagactcctcaacgtttatccgcaaaggagtgatcttcaatctggacaagacagcacaaagcctgacttctatcatcaacagactggaaggtgagttgaaaaactcaatcgccaaggtatacgtaggcattggcggacaatccctccgcacagtccgcaacgtagtaagtcgcgacctcgaagaagaagcgattatctcggaagagctggtaaacgctatcggcgatgagaatgtagcgattccggtagtcgatatggatatactggacgtagcgccgcaagaatacaaagtcggcaataatctgcaagccaatccggtgggactggtaggaagccacatcgaaggacgtttcctcaatatcgtcgcccgctcttccgtacggaagaatctggaacactgcttccagcaggcaaagatcgatattgccgaccaactgatcgcgccactggttacagccaatgccgtgctgaccgagagcgaacgccgttcaggctgcgcactcatcgacttcggagctgataccaccactatttcggtttataaaaacaacattctccgcttcctgacagtgctgccgctgggaggaaacagcatcacccgcgacatcaccaccctgcaaatggaggaagaagaagcggaacgtctgaagaaaacttacggagacgccctatacgaagaagacgaaagcgaagagcccgccacctgcaagctcgaagatgaaagccgcacagtcgaactgagcaagctcaacaacatcatcgaggcacgtgccgaggaaatcatcgccaacgtatggaaccagattcaaatctccggctacgaagacaaactgctggccggcatcatcctcacaggtggagccgccaacctgaagaatctggaagaaatgcttcgcagacgctcgaagatagaaaagatgagaatggcgaaactgcctcgcaacaccattcacgctcccagcaatatactgaagaaggacggttcgcagaacaccctgttcggacttctgttcgaaggcaatcagaactgctgcctgatagaaaccgctccccagataccggtcactcccgccactccccgaccggagccggaaattcacaagaccgtagacatgtttgaggacgatcaggaactgaaagagcaagcccgactggcacgcctcaagaaagaagaggaagagaaagaagcacgggcagccgccaaggaagctgaaagactccgcaagcagaaggagaaagaagagaaagaaagacgcaagagagaagccggtcccagctggattcaacgcaagatcgactccctgaccaaggaaatcttctctgacgacgatatgaaataaattcaaaattcaataatatggacgagatagtacaattcgatttcccgaccgactcaccgaaaatcatcaaagtaattggtgtaggtggcggtggcggtaacgctgtgaaccacatgtaccgggaaggcatacatgacgtaacgttcgttctctgcaacacggacaaccaggcattggccgagtcacccgttccggtgaaactgcaactgggccgtagcatcacacaaggacttggagccggcaaccgtcccgaacgggcacgcgacgccgccgaagaaagtattgacgatatcaaagaacagctgaacgacggcaccaagatggtattcatcactgccggaatgggaggaggaaccggaaccggagccgcccctgtcatcgcccgcattgcgaaggagatggatattctgacagtaggtattgtcaccattccatttattttcgaaggagaaaagaaaattattcaggcactggacggcgtcgaacgtatcgcccagcacgtagatgccctgctggtcatcaacaacgagcgcctgcgcgaaatatatgccgaccttaccttcatgaatgctttcggcaaggccgatgatacgctttccatcgctgcaaagagtatcgccgagataatcaccatgcgtggtacggtgaatctggactttgccgatgtgaagaccatcctgaaagacggtggtgtagccatcatgagtaccggattcggagaaggcgagaaccgtgtcaccaaagctatcgacgatgccctccactctccgttgctgaacaacaacgacatcttcaacgcaaaaaaggtaatgttgaacgtatccttctgtcccacgtccgaactgatgatggaagaaatgaacgagatacacgagttcatgagcaagttccgcgaaggtgtggaagtaatctggggagtcgccgtagacaactctctggacaccaaagtaaagatcaccgtactcgccaccggatttggtgtggaagacgtgcccggtatggacacactgcacgaagcccgcagccaggaggaagaagaacgccagttgcagcttgaagaagagaaggagaagaataaagagcgtatccgcaaggcatacggtgaaagtgccggcatcggaaagaaaagcctgcgcagccgtcgccatatctatatcttcaataccgaagatttggacaacgacgacatcatcgccatgatagaggaatctcctacttacacgcgcgataaaacgaagctgttgaagatcaagacgaaagcggctcttgaagaggaagttgccatggaagaggctacggacaatgacggagtaatcactttctaaatggttcttccccttgctattataaattgtaaataattaaaatataaatatcatcatggatttatttgacaaagtcagcgaagacattaaaaacgcaatgaaggcaaaggataaagttgccttggagactttaagaaacataaagaaattcttcatcgaagctaaaacagctccgggagccaacgatacactgacagacgaagcagccttgaaaatcattcagaaactggtgaaacaaggtaaggattctgccgaaatatatatcggacagggacgccaggatctggctgacggagaactggcacaggttgccgtaatggaagcttatttgcccaaacaaatgactgctgaagaactggaagctgcattgaaggaaatcattgccgaaacaggtgctaccagcggaaaagatatgggtaaggtgatgggagttgcctccaagaagttggcaggactggcagaaggccgtgctatttctgcaaaagtaaaagagttgttgggataagcccccacacctcctccccagaaataaaaaaaactttttggtctcacggtctcattccattaagataagccgtagataatcagcaatataaagagtgagagatccttttcaaacaggtgtctctcactcttttcttcattcaaacagctatttttcacgtatctctcattcacttcaagggtatctctcattgtttttagggctttacatgttatactgctacctatatccttctcttttgatacctacatctgcatgttttcttaccgatatcttcatcgttccacccgggtaggacgaactgtctactactgtgacacgatcagttcacctaagtgcgatgatcatatcacccgggtagaacgatgaagatatcggtgagataatatgataataccaattgaaagacaggagaatataggatcatttgcatctaaaagagcggtaaacaataacttcttgatttatgaaattacctatttaacatcaagttacaagaataaaaacataataaatggcattatataaattaaattcttacttttgtaacaataggaagataacattcctgctttgacgacaggcaaaacattctttttgaatagtatctataacgaactaaattacgacaaacagatgaaaagcagtacattgataactattctatctacattcttattagtagggtgcagcaaacaacaatccactttggacaaacaactggatgaggttgaaaaaatcatagaagtaaatcctgatagcgcatcaagcatactggaaaacatagcatctccggagcagctggatgataaaacctttgcacgctggtgcatactatcgggcaaagtcactgacgaaatctttaataccctattgccatcttatcaattcgagcgagctaacacttggtattcatcctacggtaaatccaatgaacaagtacaaatcttaatttatttaggacgttcctatgcaaatgacggggattatgacaaagcaatgtctatatatactaatgcgttagagattggagaaaagaacaaactctataatttagttgggtatacatatagctatataggcgacttatatagagagaaagccatgcgaacagaagctatcaaaaaatacgaaatggctgccgacaatttcaaaaaagaaaataatatagatagctacacttgtgctctaagagacatggggcgtgaatatgcaagtattgattcgttatcacacgctatagaaattctatctacagcggactctcttacagcaaactccaaggacatagatgtaaaagctgccatcgacaatgctttaggaaatatctatgtaatgcaaaacaaatatgatgaagccaaaaaattcttctacaaagcactggaaggaagagaaaaaatgcctaactacatggcattaattgacctatacatagcgtctgactctataagccaagcaaaaggacttctacagaagattccacaagatgatcctacctatacttatagtattaaatatttgtattaccaaatatacaaatcggaaaaaaaatatgagaaagcactcacttatctggaagaatgtacagacttggtagattccattgtatatgcagataatcaatctaagatactaaacatagaatctaaatataaccacttgaaaattagcaaggaaatagataaattaaagatgaagcaacaaagctacattatagtttctgttatctgcattgcagctctactattaatggttataggatatttattatacagaaaacaagcaaaagagaagatactaaagcagcaaaaagaattagataagatgaaattagacctatacacactttctcttgaacttgaaaaaaaacgaagtttattaaacacattcaaagaaaaagacgaaaattatgataaaatgcaaaaagaaatagatcacctattcactaattacaggaaattacagaacaaaatattaaccgattctcctttatataaagaacttgtttctcttgctaataaaaatacgcctagaattacagaaccattgataagcaaaaatcaatggaaactcatagttaacgaaataacaagtatttatcccaacctttacaattatctatttagcttatgcccgactttatcagacgaagattttcaatattgttgtttctacctatatggattcgacactaatgtagaagctaaattattaaatattgccattggctctgtaagtagaaagcataccaggcttaaaggaaaactgaatataacactaccaagcaactcaactttatatgaatacttgatgataaatatggggtagctttcatgtttatatgaacattttgtacctgtcacactgatggtacacacaaaaagcataaccaactgattatcaagcaccacttgtccatgtcaaaacaatcattttactaaatgtagatctctatttttcataaatttgcagaaaacatttagacatatgagaaagttaagcattacactattattaattggcatttcattcatgacaatggaagccaataattattcaacagaccacaaaactcgaatctattttaagaagtggaatgaacgccaaaagacagttatttttttacctatagaagctactatagaggaaaataacatcgaagtacagttttttgaaaaatcgaacgagccagccaccttccaagttaaagacaaaaatggaaacattgtattccaagacgtggtgattcctgataagctagaaatctataaaatagatttagatggctttaaagctggttcatacgagttattctacatagaagaaagtatagcctttgtaggagagtttcaaatcgaatagataatgattataaaccaatatatcaaagaaactccctaagcatgatacaaatcatgcttaacagaaaaatagaacaaaagcaaaacaacctcctaaaataaaaatcaaagtatgaaaaagcaaacattaattaatctatttattctattctttttgttttcttgtcaaagttatgaattcgagaacattgagattaatgatactcctatagagaataatccctataaagtgagtatcgacgaagctaaggacatcgctttaaactttatgaagacattccaaaagacacccgccgcatcaaccagaagcgctggtatctcgatagaaaatgtagaagttgtaaaagtcaacaaagcagcaacgagaagcgctggtatagaaaatggcatggacaccctactatatgcagtcaatttctccaataacaacggatatatattggtaggtgcggacagaaggacagatcctattttcgggattatagacaatggctctttttccgacgagagtatcacaaccaatcccaactttgcattttttcttgatttggcattaggaaaagcagtatacgacatcctaaagaatgatactgtcaagattgttaatacgcgatctatcaatgattatgacgatgtatatggtaccgcttataacctaagttccaaatggggacaaggagcaccttacaaccaatattgtcctgggccatacacaggctgtgttgccactgccactgctcagattctatcattttttccaactatcggtagtgtaaactggcaagacggctcatcttacggaagcagtgttcttcattggaagcagatagcaactgattgttttagatacaaaggaatacttaacacagttacaaccccgcaatccgcaaatgaggtagcacatctaatgcgatatctgggagtagcactcaaagccgaatataaaagtgacggtactagcatagagtctaaaaacgctataaattggttaaatgactacgcatcattaaaagcgtccggattaaagaaatatgatgctgatcaagttttcatggcagctaatagattctcggataaaatagtctatatgagaggaaatcgaggtaaaaaaagttttgtcgggattacaatcacatataccggaggacacgcatggatagctgacggatcatttactgcaacaagaaagagtgatgggcaacgagttaaccttttccacttcaactggggatgggacggaagatctaatggctattttccagcagctgtatttgacagtagcaaccccgcaatcaacgattcagaactaccaggtatactaagtttagacaatgatggaacatcaggaaataactataaatataatgtagagtattctatagttgagaatcccaacagaccggaaagcggaggtacaattaaataattgcaataacatgaaactgcatcacattaaattattaagctttttattagcagtctttctgacaagttgcaaagaaagtactgatacacctccattcgtctttcgatgcctagtgaaacttgttaatgaagacggaagcttgcctttggaagaaaacaaagataaaacaagcgaaatcacaataaacctgataaagccaacggataacaacgctcaaatagagaatatgctttatcttgattatgatggtaaccttaacatacagattctggataggaaagctactattaaaaatgatggcaattatgatcaggagtatagattcgaaatccaatatcccgaagaaatccgtaggagaaaagacacgattagaattaaatatcggtttaaagattacagaccctctatcatagaagccttctacaatgataaaaagccacaatatatgggtactgatgttacttatttcgaggttgaaaattgaaataaaacatatttcgaccaactttattgaaattctattataaaagattgcaagtcgtagagacttaaaaaagcattggtaggagtgaacgtatgtaaaaaagcagactaaagtctgagaagcagttcactttaagagatatgaatttccctacccttcaataccttttaccaaacttattattcactaagaaatatcgttatgaaatcaatgaaatttaaaaatagatttagatggctttaaagccgatcaatatgaactactttatatagaaaaagctgtgactttcattggagagtttgaaatcgagtaggtaaaacctcagctcataaaataatattaactaaaaattataccatgagaaaactattaattatcgtatcattgtttacaatgatgtcatgtcaagagaatcttgatatgattgacagtgaaaacttacctgaaacaagtagtagcacgaaccctgaattcaaagttaatgaagaagacattcaatcgactattgatgagttttatggagtatcctctctctcccctacaagggtagaaaattctgttagtataaagaaaataacttcattgactaaaagcaagacacgaaatattggcagtgactctgatatagatgtaaatgacattctttatatagtaaagttatctaatggaaatactgcttttgttgcagctgataagcgtgccaaatcattatatggcattgcagatggaaatgtagagcttgacaatactgatctcataaacagtaacatacccggtggattagttgccattttaagcaatgcaatagccgatattaagtattctataaaatacaatactgaagttaatgacgattggaaaacggtaaacgtttccacaagggcagactcagatatagttggaggaaaagaaatgtttaccatggagccaaggtgtccagtttcttggcatcaattcgctccgtttaataatgcatgtcctctatataccaacagcaatggagataaagtacactctgctgcgggatgcgttgcagttgcagcagcacaagctctattatgtttatgggaccgttcaaaaactactttttattactacacattaataacatcatgggatcggctaagcgaaataaaacatgacaatcagtttattgccggaagtgatgaagaaactgatgtcgcaaatttaatacatgaaatcggacaagcagtaggaatgaagtatggaccgagtagtagtgcgaatacagaagatgcagtaaaagccgtatgccttttatcacaaggttatcttaaatatgaaaagtccccttttaatgaaactattgaaaatactttaatacagaaaagtggtatagtatggttatctgccagaaatagtaatgacgaagggcattcaatgctaatagatgcattacgtttcgtatttactactggggcttgtggcacatgcatagatgcaacaaaatatgtaaagagatatttccatatcaattatggatggggagaaagttataatggttattatctttatataccacagtcagataattatgatcaggacttgagatgggaaggcacatctagaacctttccatatcaaatgaaagcattcagtgtatggcaaacaaaaaatgaataaaatgaaacataaattaaccatagttgtcctttatatgatcataagttcgtgcaataatactgattccaatgaattcgctttctcgaactatagttgggaatgtcccaaagaaggaggtaaggaaatattcacatccaataaagaagaatgggaaattgatcagttaatacttgatggaattattattaaagaatatagtccagaatatattgataaaaatcagagttttccacctgacaaatttgaatttgattttttctcttttaaaatcgaaggaaagaaagttactatttgtatactagaaaacactacaggaaaaagtagaagtataaaatttatatgcagacatgtaaatacatatcatgctataactgttgtacagctacctgatatcaatatcattgaacactctggaaactaaaagtttcgatgaataagtattatatagttggcataacagtaatatgaagagtattctcttaaaaagataaaagatcaatcaaaagacacattaattaaacaatctaataataagtaatcatgaaaacaacaaaatctaatattctatcaggacttacctatgctttatcagtaataggttgtctatctgttgcttcgtgtgcagataatgggaattatattgaaaaggattcgagtataaaatctgaatctgataattcaaaatatgacgaaaacaactatagttttaatactataagcttatggggtagtgaagcggccgtagttgataaaggagactactatatttttcaaggtgacattcacttattaaaagaagatttaatacaaaccagaggtgctgccagaatagatcgtagatggcctaacaataaagtttattattctgtggacggtattccagctatatatacaaagtatatatacagagcaatagaatggattgagaatggttcatatatcgatatggtaccccgttacaatgaaggagactatattcaattcaattttttggatcagaatgaatggtcagcatattctgattatgtaggaagaaaaggagggacccaaaccattaatctatcccgggaagcaattataagtgttggcactattgctcatgaaatatgccatgcaattgggatgtatcatgaaatgagcagaaccgacagggacaattacatacgtattaattttgaaggtatggatgaagatacacgatatcagtataaaacttatgccgaaatgaatcagaatggagtaaatgtaggaagttttgattttggttctataatgatgtattcttctggtggagtcatgtacaaacttgataatagttacataagatcacaaagagatagtctatcaaatactgacatgttaactttggcaacattacaacctataggagaccaattcaaatttttcgatccatacggttataatgaaccttacgacagcgattatgaatatagaagaaccaaaatcatacaatgtcctgaaggggctaagatagacttcaaatttcaatataattataaacctacatcatctaacttaggtggatatactgtagacgattttaatgtcagaaccataatctcaattatcaatagaaatactaatcaagaagtttattcaaaagaaatcccccttggcgtcactacaacatggacagatatctatttaagaggtatcaatataccacaaggcggattcactacaaaggtaacattaataggttcagtgaagggaacatctacctctgataaattaaatgctctaaaaagagttatgtacaatccaagtgtatacttgcatcttgataaagtggaaataaaaggagtaaataaacatattcccaatgaatttggaaatgatgatagaatctttacgttcatatcaatatgataaacaggatatataacacttttgtatttttaatcattataggtttatgcttttattcttgtaatgacgatgagaagcaaaaagaaaaatataaaataatgactctaaaagtcgcagcttatagagattattatgttgcaccggagcatggtataactaccaatatattgggttatgttgttacagatgaaaacaacaagacatacgtcatcgaaacaatcaaaggttttgaagatgagtatgaagaagggtatgagtttgtggttaaagtcaaagcagtaaacaagaatcaagacgaaccggtacaagatctactgggatattattactatctactggaaatattaaataaggaaaaagtttaagacgctaattagaaaactggttatataaaaaaatcctctatgaattagcagtagggagtggtagctttttatcactcccttattggactattcgttttttattgtaatattgcataatcataaataactgaatgtcgacatatattcatctacataaagaagccattagaaagatatgagactagatcaaactaaattattagattttctattcacagctttcatcctaattggctgcaaagaaaacattgataccagctcatgtctaaactgtttttttccaaaatatgcagttattttttcgtagcttactgttcaagccttacacagataacacaaaaacagtgcaataaactttatacgtcctaagtttatatttttaccaaaatatatttgcagaataaatacaaattctatatctttacttttgtccctattttagtgtaagcccccgataaagtacccgttgtcttt

SEQ ID NO: 4601 - DNA, 2007 bp, Unknown
  gut microbiota DNA sequence
atccagatcaatgtgatgggagaggtcgtgcagccgggtacctacgccctttcttccttctctaccgtcttccatgcgctttaccgtgcaggcggcgtgagtgatatcggcagcctccgaaacgttcagttggtacgcaacggaaagaatatcgccaccatcgatgtttacgaatttatcatgaaaggcaacacacaggatgacatccgccttcaggaaggtgacgtggttatcgtccccgcctacgatgtcttggtaaagatcagcggcaaggtaaaacgtcctatgcgtttcgaaatgaagaaggacgagaaccttgccactttaatcaaatatgccggcggctttgaagccgatgcctacacccgttcattgcgtgttgtccgtcagaatggtgaggaatatgaggtcaacacggtcaaggatatggactacagcatctacacaatgcgtaacggtgacgttgtaacagccgaagccatccttaaccgcttcacaaacaaactggaaatccgtggcgctgtctatcgtcccggtatctaccagctcagcggtaaactgaacacgatccgcgaacttgtccatgaagctcagggtctgaccggtgacgctttcctgaatcgtgccgtcctttatcgccagcgtgaggatttgaccagtgaagttgttcagatagacatcaagtctatcatggacggtacttccccgaaccttgccctgatgaagaatgacatcctttacattccgagcattcacgatctggaagatcgtggcaatgtcacagttcacggtgaggtcgcgcaccctgactcctatccctatgctgataacatgacacttgaggatctgatcatccaggccggtggcttgaaagaagccgcctccactgtccgcattgatgtgtcgagacgaatcaagaatccccgtagtatcgcggataatgatacgatcggtcagatgtataccttctctttaaaggatggttttgtcattgacggtcagcccggttttatccttcagccttatgacgaagtttatgtccgtcgcagtccgggttatcaggcacaacagaatgtagtcattgatggtgaaatccttttcggaggaaattatgccatgaccaaccgtgaggaacgtctttccgatctggtgaataaagcgggtggccctacgagtcttgcttatcttcgtggtgcaaagctgacccgtgtggcaagtgccggtgagaagaaacgtatgggtgatgtgattcgcctgatgagcaggcaattgggtgaagccatgattgactctttgggtattggtgttgaggatacctttacggtaggtattgatctggagaaggctttgactaatcctaagggtagtgccgaccttgtcctacgtgaaggtgatgtggtctttatacctaagaatactaatactgtaactatcaatggtgctgtcatggttccgaatacggtttcttatatgaagggaaagaatgtggattattacctgaatcaggccggtggctattctgataatgcaaggaagagtaagaagttcattgtttacatgaatggtcaggtgacgaaggttaagggaagtggtaagaaacagattgagccggggtgtgagattattgtgcctggtaaggctaagaagaaagggaatataggtaatattttaagttttgctactacttttagtacgctaggggtaatgattgcttctgttgcaaatctgattaagaaataatactaagatttattaggtaatttatatatcatgttaaaagataaatcaatgacacaatattcggaagtacctaaatcaaaagttgacgagcaggaaattgacttaatggagattttgcgtaaaattataagtattcgtaaaacaatttataaggctgccggtgttggattggtaattggtctcattgttgcaataagcatccctaagcaatacacagttaaagtcactctttctccggaaatgggtaaccctaaaggaggaaatgct

SEQ ID NO: 4602 - DNA, 168 bp, Unknown
  gut microbiota DNA sequence
gatggtacaattgccgatacaatcccaatgtgtatcgaagcctttaagcaggcagtatctccctatgcatcaaaaatgttgtcagaagatgatattgtgaaaacattcggacttaatgaagagggaatgattaaagaggtcgtttcagaagattgggaaaaagctctg

SEQ ID NO: 4603 - DNA, 2111 bp, Unknown
  gut microbiota DNA sequence
ttgttaaagaacttggtttgcgtaagtaatctacttgccgcgaaaagattaaaaaccgtttctcacattgagaaacggtttttttagttcgcccagcacgaacatattctaacgggtgtaagtccctaaagcgccctgacaacgggaagtatatagccaacggcaagggtgtccatcgtgaggtggaatctgaaggaagcctgcggcaaatatctggtctgacgtacagaaacttgatattaaggcttaaggatgtggataagtttgctaaacaaaacgaagtcctatagttgtccggaacatccaaagtaaatcaagcagacataagatggaaagaatatgtccataactggggaggtctcacgggcgaggaaaaataaataaatacagtcaagcagtaataacgaaccgtgagaagtcagcagaggtcatagtaaccgacaaggtaaaaaaatcggcagtcggtgaaggactgaacttttaatcaaacaagtaccatttaatactttatgaaagagtcaatgcggaaaatcagtaaaacgaactgcccacaaatggataggacagcatccgacgagtatgtgggagtgcagacttttatggagataaaagatgagcagcttgtggaagtgcaattggaagaaaacaatctgttggaactccttctaagtccatcgaacttgaatgcggcataccgccaagtcgtaaggaatggaggagtgggaggtgtcgataagatggagacgagcgaactgttgccataccttaccctccataaagacgaattgttggaaaagatacgcagggggaagtatcgtccgtcccctgtgcgcaggttagaaattccgaaagacaacggtaaaactcgcccattaggtatcccgacagtggtagaccgctttgttcagcaggcaatcagccaagtgttgataccgctttacgaacctcagttcagtgagaacagcttcggcttccgccctcatcgtagtgctcacgatgcactgcataaggtgcaggaatatgcagaccaaggttatcgctactgtatcggtttggatttggaaaagttctttgaccgtgttaaccacagcaaactgatagaggtcttatcccgaaccgtcaaggacggcagtgtaatatctttgatacacaaataccttaatgcaggagttgtagtatctcacaaatacgcggagactgccgagggcgtcccccaaggtggtccattgagtcctatattgagcaatattcttcttaatgagttggaccaggaattggaacgcagggggcacccgtttgtccgctatgccgatgattgtctgatccttgtccatagtcttcgggcaacggagcgagtccgtgatagtatttccgagtttatagaaaagaagttattcttgaaagtaaacaaagagaagacagaagtcggttccatctgcggcaagaagtatcttggacactccttctactgaagagccgaccgtaaatgtggtcttaatcttcataagaaaagtcaatccaagttcaaacgcaccatcaagcacctgaccagccgtagtagtggtcaaggctacgcttggctgaaactccacctgacgcaatacatccgaggttggctgacatactatcgttatgccgatatgaaagattttataatcaaaacagcgaagtggtacaatcgtcgtcttagaatgtatatatggaagagttggaagcgggtacgtacacgttttgccagcttgcagaagtgtggcatccctcgtcggaaatcttgggaatgggcgaatacccgtaaaggctattggcgcattgcggatagttggatattgcatagagcaatcacaacagataagcttgtaatggcgggttatccgtcaatgataattctttatacccaattgcatcgcagttaagagaaccgccgtatgccgaacggcacgtacggtggtgtgagaggtcggaaaacgaaagtaggaggaaaacttctacttcgttttcctcctactcgattgtcatttgtatgacatttatgctttcacgcgtcctacgtaagaaccgtcacgagtgtcgatttcaattgtttcaccttcgctgatgaacaaaggcacacg

SEQ ID NO: 4604 - DNA, 32119 bp, Unknown
  gut microbiota DNA sequence
tgtgtaaccagcagtctgacgtaacgtaccgaagtcggcttaaactggcgaactaccgtgtttttcttgttatcactcagttcatcaatcgttttccattcttcgtccggactgtttctgccttgtaagaagcaggtatgagtgataaagacgctgccttcatttccggcatttaccaacttccatccacggatcgtctgttcctttccgaagtcgaagtcaatgtagttgggagccgtgcttgtatcacaccatttcgtcttcacatcaccgtctacggcatatcttgcaacttctttttcgttggtttcaccggaacatttgattagtttggtttgtttcaacaggtttgttttagtcgtcgcttcttctccattgtctgctttcaaggctgtgcggaacaattccgaggccggagttactgccggatacttctcattaaccagcgttgcggcaaataatacgatatctgcatgatccggcaaagtaaccgtagtcgctcctttaggaatatccatgccaaacttgaacatatacgtaaactcataagcctcatctttgtcagaagcatgacggtgagtgccgacataagcgatttctgcatctttcaggaagccttccgtatgtcccagatgctcccactgaccgataaaaccggtataggaaggtacggtgatttcctgtgagttgttaccggtgctgaaggtagcaactgcatcttcaccggcagaggctgccaggaaatagatacggttgtaagaatgtccggttggcaactgaagtatattgcctttgcaagtcaaaccattggcaatttctttctctcccaggcggaaaggaatgccgtcagctttcaggatggagtcggggagaagttctgctgcatagctgttgcccgattcgaagttcccttctttgcggaaagcattccaactgaaacatctgcgatcatagtccaaaggaagataagcgcatgccggagcttgaagatcagcttttttcttcagcttcactttaaatgtctgtatgctgtagggagcgatggatacattcagctggttcttgttgaagtcagcactgccgatctctttttccgtaccgtctgcaagtactgccttctctatttcaccggcgaaggtgatggctgcctgttgcggagctgcgcctcctgtttcatatacacgtactacatattcatcggatacttccgcttttttcagcgctttgataacgacttgatcgttgcttgaacgtacaaaagcaaattctttacctagtgttccggcatgtttcggactgctgaaggctttgatcggctgattcagaatttcagctttgatggcggtggcgggtttgtcaagtgctccgttatgtcctgtgaggctataagtaaatgtatggaagccgaagtcctggtgatcctgataagcgtaatttccttttgtttccggtgtatggagaagagtcagacggatcgtgttgttatccggtttatcccagccatatttactgtcatttaggatcgatacaccgtagctgttgttcttatcggtcaggtctgcccattgctgcgcatatacttcgtaagcggtctgtacattattgcctctttccacgctgccgattcccagatcgtaagtagccttttcattttctatattcagaggaaactctgctttcagcagcgtgtttgttgactgccagtctatttcgttatagaaatctatgcggtcggcacggctgccttcgtagaggcggatgtattgcttgaagagcgatttgccatacttcttctcaatgtagagtgctttacggagtgcgccgttttccactaaagtgatctttgcgccgtctgtgatggagacaggttcacggtcgatggtctctttcaggatttcccatgcaggccatgcgtacgacttgttttcggtgaagagtgccaggcgaatcgcttttccatcttttacgagttctttgttgttgcgcttgtcggtcagtgagatgatatctccgtttttatccagtgtgattttgtagacggagttttcgatggctgaggcggctgaaggagagatcgttttttcagatcctccggtgcggacatcgtacactgcataactgtttgcgggcagtgacgctgcaaccaggatgtgagcacgtccgttctcgtaaccgatcatttgcgaagcgactttcttgccttgtgcattgtatacagtgaagcctttcggggttttaggctgttcgaggatgatctctgtcaagtccgataccgggaaagcgtttgcattataaagaacgacaggcgttcctttcacgcgtgtatccatctgtccggcaatggcgttgacggaagaagtcagtacttgtgagaattgttttagagagatcagttcatcgttccatgagaactcataggcacgggggatactcgttcccgtcaggtcatcatggaattgatggaagatgaaacgtttccatgcctccgtcagcgtgtgttgcggatagctggcagtacccaaccattcggcagcgaccgccgctctttctgctgcatcgcccaactgttcgttttgccggttgtacagcttcatggctgcctgcgaagtatagcaacctgttccgtgaacatccatcaataactctccgtcaaataccggcagttccgggtgattgttgaacggcagataatctttgaacaactgatcgctggtagcactgatcacctctaccggaccatcacctttgattccctgttctacagaacgtaccgaacccagagtaggagaaccaccgatgtcccctgttccataatagcggtagaccgtattgagcggagtacgttgggctaatttttccagatctttattcttcgagagatcttcgttgttccatttgcgtccgtagtcatatccgtgggctagcattacttgtttgccgtcaatgcccttccagagtccgatggtaaacggatgcttgctctttccgtagaagggatgattacgccagtccagtttctgtgaagagaagccgatcagtccgcagtgtgcggcaatggtgggaagcgtccatccgaatccgaagcagtccggcaggaagatatccgttccttcttttccgaactcttgccggtagtacgtctgtccgagcatgatgttacggatggaggcttcgacggaaggaaccaacacatcacttgcttcccagctacttccggcgatatgccagcggccttcctcgatgaatttcttcatctcttcatactgttcgggatagtattccttcatccacgcatacttcactcccccttcaaagttgaaaacgtattcgggatatttctttagcagaaataagttctgactaatggtattccagacatattcgttgattgttgtctggatgtcccagttccactgggtgtcgaggtgggcgtccgacaccatataggctttcacctttttcttcgcggtgtcatcttgtgcatagcttcctcctgctaaggcaagggcgagggctacggcaattacttttttgttcatcatggtttatttttaacaagtttagtagtttacaaatttatacaaaactaatggaattaattctattagggtttagaatagtacttctttatggaaatggcacggatatttacctttttggcaccactttacatctagaaagtattcttgtccggttcgggctgcatcttgtcagtcataaagaatgattgctcaagaagctttttgtcattcaaaacgtgtccaaatatagcggatttcgaatgattagctgtcctttgtagtgccaatatgtaggcaaatatattttgtctgttcagagtactctatggataattagggtataagataagtagctgattatcattctataatatatgtttgtgaacaatgaaagtacagcaggtgtcggcaatgacaaaccagtatcaatactctctgaccattttatcttatcatgttttttagatgttgcggtaataactcccatgatatgctctccatttgtttcccggtcattacgtttattgcagttgatgtagaaaagaaatttacaatgattcttttagtgtttgttgataaaatagcttttcttgcataacttggttatataaactcaaattcccgttctccatgtcccggcatgcagatgagctgcataatctccaaagtggcatgagatttcattgtgataaggttgcctgcaccttttatctgtatttcttaataatgtgatgtctgtatacattccatagttatcccaatatgtgtctgttagtaggccgggacctgttatgtctaaaatctcctgttgcgattttaagattattgtggctctttctgccatttcatccattattctgtgtaaaaaaggatgtttagggattccaccgaacatatagttggctattcgaagtcgatatcttaaattcaaggcttcttgctctgcctggcagacaattttctcttctcctaaaaccaaattatactttctcaactcatcaagtggctttaaacttaacatatctaaatccatatagaatcctccatagaggtgtacaagggctaatcttaagaagtctgctttttgtacattgtgatagaatgcattataggcttcgatgtattcaggtaaatcttgatttaatatatcctgtgcatcatccttattatataggcggatattccagtccggatgattgacttgtatttcttgtttgcatttctcgaatagttcggggaacggttcatctttgcgtagaaagataaggtgtatattctttgggatcattatttattttatttttaaaggttacttaccaaaccaggtaccaaagaaatagtgtatggcatgagcctgattgatacgctcttccatttctttaggaatctggttgttttttattttctctacctcccattgtccgataggatatattgtctttgattcgaggatacgtatgtcttctttatgtggaaatgcgttgaatgcatgcgttagcaagaaagggcctgtggaatctagtatatcaaatccgttattaacaactttccctccggaatgattgattaacctttggcatacaaagttgataaaatcattatcgggtgttgacgccatgaaagcgttgcaaatgatatattcaaaaccaaagcgtttagcatgccagtcgggttccttacctacgataaaatccgatccttctagtaagaactcaatattttcgaggcactcgaaatccatgtctacgtacaatcctccataaactttcaagagaagatagcgtatagcgtctgctctttgtatgttacaaggatatgtatcatacttctccaggaaatcagggaaatgtttgcagacaaattccctgttcatttcatctgtccataggatatattcccaattcgggagatattctttccatgtttgtggcagttggtcaagaggagaaggtacatcttttgttttccatgtttggtggataattcgtgggattcttaaactgtttttcatagtctttattgttgaaatattttcttttctttaatattttctcttctatatcgaatgagggtttcattgctcttcaacatgtccggagtgtagatttgcggttgataatatgcctcttccagttttttaaactttccatccggcattatctgatatttagtatctatacgttgccctttcaggttatctaggtgtataaaatttctttttatactatcgaactgaatgatgtaattattttcaggaaagttcaactgttgaacattcaccgtaaaatctttattgatttgtgcttccatggttctagctttgctgcatgttccaggccattcacaaatgggaatgtagtcaatgattgctcctgcaaaattgaatgtaactaaccaatgtttatccatatcgtgaagagctgaccaagttctgactattcccatgatatattttccattagtatcttcaatgagagaaagaactgtttcaatgggaggtctcttgtctcttttgtcaagattagcatagaatggagaattgcttattctataagatgtaccttgagttactgctctcgtatgttcaaaatcatcacgagagatactgttgttgtcttggtaaacaaagaatgaaatatcataattgatgggtagctttaggaactcattttttgaaaaaacatagaatacacgttgcaagttcttttcttttatatccgatagcttcactaaagaagtgactttgtagctgttttggccatacatagatagtccgcttgccattattaatataattaaaattgctacttttttcatggttgattattatttatagatgatgatagagtccacggtaaaagtggactctatcgtttcgttctaggttatacatttttatattataaagatgttgtatcatatttcccaccgtcgttgggtcttacttgagttacagtataatatctgttagcaacctttgtgcttccctctagctttaaattttcagttttgtagtaaaggcgattaatgttgctacatccatcatcagagttggaagttgcattatccataaatgtatagtaatactgttgtcgtgaagtatcatatcctcttcctgtaactacaataaaatggtctgtaccgtcgatgtttggatttaaatcgagatcataatcaactcctactatgataactcgttttgcattgagatgtttatcgatacattcaattgcatttttgtagttttgagctggatcatttccccagtttgttaataatccatttgcagaatcaactagcttaaaaacatttaagctacttccgtaattggataatccatatttttttagtgtttctttgcaaagacttaagcaattagctccttctctccaaccaacaaacctacttttgtccattaattctattggatctttgggaacgggtttgtctccacctccaggtttcggaccatcaccgctagttcctccaccgctagttcctccaccactagttccaccaccagtccacccgctaccacttccccaatctccacttccccagtgtccgcttccccaatactcgccagaaccactaccgctgccggaaccactaccggaaccgaaacctgatccgctaccgtagatagttacgtccggtgtcatccatccaatgccacatacatagacggtggtatctaaggctccttgggcattaagccgttgataaacttcttctgtcatgcaatcattgggacctgtacctgcccctgaattgtaactggagatcaatatggtttggttgatccctcttaattttaatttctccgctttacttttcttttccataatacatgataattttagtgtttataaataaagtcgtttcttttggatgcatagataagtttatacacttgtttaagttgaaatcaattgatacatatcaccccatgataaagaagatattctacttccgtcagaattaatttgtaagtttgttctttatctttgctgatttcagatgaaaaacaaggtagcaattcgttgaacagacattcaaatgtcttctcttcttctatgagaatcagaatattataacataaatcgttaataagcacttctttaaaaccctcatatagcagacatggaatgcatactatatcaaagtggtctgaatggcactctttgtttatacgttctttaagcagtttttttgcttctgtcggccagggttccggaatttcgtaaatggataggtagggatttctattaatagtaaatatggcttgttcctcttttccggcatttagaaacatgaaataggaagatgagcatttctcccaatcatacagatcggtataagatagcttttcccattttttggacaaagaatgaagataatcttgataggatgcaatacacatttgtacactcaaatcggggaaggtagtatttttagccttgttttgcattcgcttatgattattcgcgaacaattctactactctattgtaatagtcaggatatttatttaatagagttttgctaagtaaatcacaaatccgttggttctttttatgtccgccgatgatatgtaatagtttggctttgtcgtatagataaaaattacagaaatcatcataaatgtatccattgtcacgaacgctgtgatcaaggactgttgccacaggtttgttataactgtttgactgggcataaaacaatatttgttcaaagaggatattgttatttatgtgaatatctttgctgtttatatcatttaaatggtttgattcgataaagttaaatgcagtccggcagtattcagctataaactccaagtcatttcctccgataattcctgcattatatgacatgatagagtctttttctaattctttttttaggaaggatggcattaataaatctttttgtagaatatgattcatcatacttttataataactgcttcctatttctttgttctgagcaatcaattcactcatctctatggtgttgtctagtttattaggcaaatatacatctccgtctacatgtatgaagggttctttttggagtgaataggttaataacttgggatatgcccaatgaggttcagggcaagttagattgtcgtattgaatgatgatatctgtatacggtagtttcaattgttcggcaaagatttcatatccatgggaatcggtatataaaacgatattttgatagttgtcttttaaagaaagacaacttaatgcccatgacattaaatggtattgtggattcatccatccaaaactattgtctaacaatgaattatttccatgccaaaaggtttgtactattttcataactattgatttgttgtgtgttatttctatagtgataaaattagtaataatgtggaggaaaaggtccttcagatagggctaattcgcatggttggcgcaaatgtttacttttttggcagtgaaatatgttttttgtgcatcaatcttgataaatataagaactgcaaggatcagcacaacctctgttcattcagaattgtgtaatccttgcagttttatttatgtcgggtagaaagaaacagtttgtttagggcagcggatctgcggcagcaggtttcttcggattgtagatagccatacccaccttggaatctgcgcaaccataatacagataccatttatccttataataaaccatcccttcgatgaacaccgttccgtctacatactgcccgctcttttcgaaactatccatcgggcggaagaacggttcgtcgagacgggtgatgaaacgggtcgggtcattggcgtcgaagagggcttgtccggcagcgtaaacattggcggtatagcgtttgtcgcctctgcttgcactgtttttaccattatacagaagtacgattccctttggagtataaatagctggaggaccgcattccgtcagctggctgtcgaagtgtccgtcacggggtgaaaacagttttctcagcgagccgtccgtatttacgtatggagtccagttgactaaatcttcggaagtggcggcaaacacatgttcctctccccaatacatgaagtattttccgtcgattttcttgatcacctgtttcccattgacaacttcggtcagaatggagccggacttgcatcctaaattgaagaacttgccgtcatacgctttggcaaaagcgggaccgtgctttgtccagtctttcagattgcgggaagtggctattgccagacgcggaatgtggcggttccattgcgtataggtcatcacatacagtccttctgctgtgacggcgatacgcgggtcttcgcatccgcccggccattccagtttcttttgagtatcgttatccggataaaataccggggtcttttcccgcttgaagtgaatgccgtcgctcgaagtggcgtatccgagacgtgaggtacggtgaccgataccgacaccggatttatcttctgcccgatacagcacgacaatcttgccgtcatgcagggtagcagccggattgaaagtgtcattggattcccatgcaacgtaatcctgtgtcatcggacaatagaatttcgtgttctctataggagatatcaccggattagctccctgtggtcgttcgaagcctccgaacgcccagtcgggtaatacgttctttttgtcgttggaaggttgtcccaaggcggtacaagtcatcatggttgtagtaaccagaaataaaaaggttgatttcatattatataattattattgggggagtaatatatactctctacatataaattaaaaaataaaaatatgctgtcatctgtcacataaatgggggcaaatagatgattatgtgattgttatgaggtgacggcaaggtgtgatagcagagtgacagtagttttgctgtcactgtggcatcgcggagacgcttacggcgaagaaggtcggtttctgcgccttgatactaaagtttcatcggcgagaaaccaaagtttcatcggtgagaaactgtggtttcatcagtgagaaactttagtttcagcagcttgaaactctagttccagtgacttgaaactttagttccaaaggcatggaaactcttgtttcatacagtgaaacgattggttccaaagcatggaactatcggtttcaccgtatgaagcagttatcttataagtaaagatggagtagagactactgaatgctgttcaataagtccactttgccttcattgaccagtttgaggatcagctctccgaacaacgtattctgccatgcaaaccatgcacgggtaaagtttttcgggtcgtttttgttgaatgattcgtgcatgaagccggtacctgcatccgtatccatcagcattttgatgcaagttttgatttctgcgtcattctggctggtgaaggctttcatcatgatactcatgggccatatcatgtcatatccgatatgcggacctccgataccttccccggcactgcctttgaagaagtaaggattgtcttcgctccatacaaacttgcgggtattctgataaatcggatcagtcactttgacgtcacccagataaggcaaagcgatgagactcggcacgttggcgtcgtccatcagtagctgattgccgaagccatctacctcgaaagcataaatcttaccgtatttcggatggttgcagacagcatatttctttaatgctttttctacttcatccgccagtgcggtacattctttggccagcgccggtttcctgttcacggtgttcagaatttcggcagctttgcgcaaggaagtaacggcaaagaagttggaaggaacgaggaactggaaagtcgtagcgtcatccgaagggcggaaagcggaagcaatcagtccgacaggtttcaccggattgccccaaccgtcattggtcatggtgtcgagtgcgcgttcggtcttacgctggaatctgtacggacctttcgcgtcgtccttacgctgctgttccttgaaagtcttcagcacatttgcaatggcctgcagccattcgtcggagaatacgctggcatcgcccgttgttttccagtaatggtatgccaggcggatcgggtagcagagagagtcgatttcccatttgcgttcgtgaagttccggtttcatgtccgtcaggtcgctcatccattcgcctccttcggagttcatgttgaaggcgttggcgtacgggtcgatattgatacatttaaactggcggttgatgactcctgccagcatctttttcagttcggggtctttattggcaagctgcacatagggccatacctgcgcaccggagtcgcggagccacatggcgtggatgtctccggtgtatacaaaagtgtcctcttttccgtcgaagtgaacggtagtgtccagtgtgttcggaaaacagttctcgaacatccatgccagtttcgcattggtcagtaattgcttgatgtggtcaatctgtcgttccacttcctgcgatacgaataagcgcttggaggcttcgggacggttggtctggtaattattgacccgggtattgtcttgctgggtcacaaattcgcggttttccattgcttgcacgccggcagcgcccgaaagtgctgcgcagaggcaaagtgttttggttatattcatggtaattgttttctttaattcatgtaagggttaataatcaatgttttatttctcgatttcagcgaacagctcgatcaggcaggcattatcgagcagccatttataaggttcctcgttatgtcctgaccagtctctgcccagtaatccgttggcatcccggtagtttctccatgcgtggagcgcgttctctgccatcgcacggacataagtcgggttgtggtcaatcttctccagcgccttgaagcctctgaacagaatcacgttaaaccacgacatatccttgtgtaccttgactgacgggtctttcttatctgctttcgaacggaaaaaggcatcggttcccgcggctgtcttctgggcatcgcgcaagtaatccttgtctcctgtctcttcgtacagtaatacacctgcctgaatcatttgtccactgttgtaggcgtacttgtctttcgagactttccctttcaggttgatattgtcccagtaaaggaagtcgtcgggatcacacaagtgttttctggtccatgcgtaagtttccttggccttgttcagatactttttgtccttcgtcagacggtatagcttgacgccgagtactgttgacggggcattggagcaggtatgcttcgcttctttctgctgttcgcaccagaagattcctccgcccagttcgtcactccagccgctgtagatgtattcgtacagggcaatggcctttttcagatagtcggccttctttgtgaggcggtagtagtcgcaataatccagtgcgatccagatgttgtcatcgtagtagcgtccatgctgaccgtatttgacagggtacgactgatagcatgccggaaggcgttctccgtcccagtactgttccagtcccggcaggatgcgcttttccagtatcgtcttgtacttcttgtctccggtagcctggtacatggctacgcaaccggacatcatccctgagtagggccacagaaaggaggccttcaaggttccgttctgctgtgctccgcctgccagataagtgattttctggtcgggattcacgggatatgtttcggtaagcagcccgtcttccgtctgatataaattcagaacattgtcgaggatagagtcggcaatggacacgaaaggatgatttttcaccgtttttccggaagcggaagcgaggcaaaacaacatacaggctacaaaacatatatttctcatatgggtatcagattattaaatgaagtattcggggttatttttgctgacgttggtcaaacaccagttccacttttacagggaaatggtcggatggtgtacgtgcttcataagccttaatggtgatctcttccggacaatctctcacgtcctcctttttactgttttcccgtacactccgataggtatctgtcagcacaccgtatctcttgacgtggaaagaaggtgaaacgaagatatggtcgatgcggctttcggtaaaactgttcggatcgaagttgttgaaagttccgttgagcgcatatcggtagtcgcacttctcgtaagaatcacagaggacgcctttgctgacaaatgcgtcgtaggactggtgggtctggtcgacgttgaagtctcccgtcaggatagccggcagattcttgcctcttcccagctctttcatcttttcctgtacgaggaaagcgctctccacacgggctttcttgccgatgtggtccatgtggagattgaagaacagaaactcgaaaccggtatctttgcatttgaagtgcccccagctgcaaatacgaggcaatacggcatcccagcctttgctcggcacgtccggagtttccgacagccagaaatctcctttttctacgatgtcgaatttgtcggtgcggtagaagatagcggagtgttcgcctttgtctttaccgtcgtcgcggcctacgccgatatagtcataaccgggaagggcttctttcatgtctttcagttggtgaaggaagcattcctgtgtgccgaaaatatcgaaatcgtgatattgcaccatctgggcaatcaccggataacgctgtccccatccgtctccacgggcggagtcggaaccgttggcatttctcaggttgtaggaggcaacggtgagcgaagtaggctgatagctctgacagttgcagaagactatcgctgcaagaacgataaataaaaggtttcttagtttcatgttttctttagtttgtttggattagatcattcattaaagcattcaaaagtacgacattttattcaaatgaaagggaatagggaatatctttttcagtcgttccccgctgtttgttcggcgtaggactcatctgatactggatattcgctcctttcagtaattggtcgtgcgtcagataattgcgggtgaatgccttgccatttaccttcatatccttcacataacggttgtcggtgttattgttgcttgcttttattgtgacggtttttccattttccagatgcagcttggctgacttgaaaaggggagttcccagaatgtactgatctgttcccggacaaacggggtagaatcctaaagccgagaagacataccaggcagaagtctgaccgttgtcttcgtcaccgcaatatccgtcggggcctgccgtgtagagcttgtccatgatttcacgaacccaatgctgggccttccacggttctcccgaatagttgtaaagataaaccatgtgctggataggctggttgccgtgagcgtactgtcccatgttcattacctgcatttcacgcatttcgtggatcatgccacggctttccataccctgtttgcccggaatgacaaagacggaatccatcatgttgttgaattctttcttgcctcccatcaggtcgatcagtccttgcggatcatggaatacgcagaaactccagtgccagctgttgccttcgcagaactcgccgctccagtctactgcatcaaatttggggttgaacacacctttgtcgtctttgcccaccatcagtttgcgttccgggtggtagacgttcttgtagttgagtgcacgctgtttgaagatgtcgatttcgcttgccggtttgcccagtttcttgcctagcgtgtagatggtccagtcgttgtacgcatattccagcgtgcgggcaacattctgtcctgtgccgatattgttggggacataacccagtttgttgtaggcgtcgtatgcaaggcggcccgaagctgtgccgcggagatgggcgtttgcgtcatgtttcaatgcttcccaaagtgtttcgatgtcatatccgcgcagtcctttgatataggcgtcggctactacggaagcggagttgttgccgaccatgcagtcacggtgtccgggacttgcccattccggaaggaatccgctttcaaggtacgcattgaccagtccttcctgcatcttctgattcatggacggatacatcaggttcaagaatgggaacagacagcggaacgtatcccagaagccggtatccgtaaacatatagcccggtagcacttttccgttgtaagggctgtagtgtacgacctgtcctttggcgtctatttcataaaagctgcgtgggaacagcatcgaacgatagaggcaggaatagaaagtgcgcagattgtcgatattatcgtcttccacatctactttgctcatttcacggttccagatgtcttttcctttagtgaccagctggtcgaaactatccttgcccaattctttgagattcagttccgcctgctcataactgataaaagaagaagctacacgtgcgtgaacgatctcccctttctgggtagcgaatccgatgatcgctccggtatggttgccctgaacttctgtttcgttcgggagaatgttgttctctttcacgccggaagtaaaggtaaacggcttgtcgaactggatgacaaaataattcttgaagttctccggcactccgccgctgttcttggtagaataaccgatgatcttgttttcttccggaatcacctttacataagagcctttgtcgaatgcgtcgataacgacataagcgttcttggtttccggatacgtgaaacggaacatagcggcacgctccgtcggaacgagttccgtagtaacgtcgtggtctgcgagatataccttataataataaggtttggcaacctccgccttgtgcgagaaccagctggcacgttggtcctggtcgaataccagtccgcctgtgatcggcatgatggaaaactgaccgtagtcgttcatccacgggctgggttgatgtgtttgtttgaagccccggattttgtcggcattgtaggtatatgcccaaccgtcgcccattttaccggtttgcggtgtccagaagttcattccccacggcagtgccgtagccggataggtatttccggtcgataactcaaacttggactgcgttcctaccagcgtgctgacatagtctaccggattcttgacggcagaaatttgcatgctgtacaacaccgcacctccaataaataacaggtgtttaaatgaaaaatgtgttttcatgaacaaatgaatttatgaataaaattagtttctgtgacgaaaatagagagaaaaggaatgccgctaccggaagtcgaaacactaaatcgccctgtggcgctataattaaccaaactggcacgcattcttacatatattctgcgccaaaaaagtgctggaaagtttttttgtttacctttgtcatattgcaaatctaaggattctatgccatgaaaaaacattgtattttacttttcttctgctgccttaatctgctgatgaatacagccggtgcctataatctgaagcaggttgctgacaaagaatatatgtccaacagctctattacttctctgtgccaggacgacaaaggactgatgtggatcggcacttgtgacggactcaatatctatgacggtcaggagatcgaagagtttaagacccgtgacaaggaggattacttatccggcaatcaaattgataatattatctataccggcaacgatacttattggttccagacctattatagcctgattcgtctggaccgtaaaacgaactccattacacgctttaatgagtttcagaaactcttcttgatgaataaggataatcatggcaccttgtttatcattaaagacaccaactgcatctattattttcataagaaggaaggcatctttaagaaaatcaatgtgactggtatcccgatatcggatgtcattactttcttctttgataaaaataaccgtatgtgggtgatgatgaaagggtataatcggtgttatgacctgcaacaggaccctctgacggagaatatcactttagtatcgcagaaaagcggtttggatcatcacacgccattgatttgtagcttttacgatgacgccgccgtttactatgtggataaagaatacaatctctatgcctttcatattgagagtaaaaagaatgaatttatagctaacctgggagcgaacatacaggcgcatgacaagatttcctccattgttaaatatcatgatagcttttttgtcggcttaatgatggacggtgttctgacgttggaaaaacaaaagggcagcggtgaatatcagattcagaccttacctataaatagcggaacattcagcctgataaaagaccgctttcaggatgttgtctggattggtacggatgggcagggcgtttatctttactcaaatcctctttattctataaaatcggtggtactgaataactataccgaaaagatagaacggcccgtgcgtgctttgctgcttgacaaggagcgtactttttggatcggtaccaaagggaatggaatacttaaaatttttgattatgaggtacaaaagaatatctcggactgccgctcggagatactgacaacatcgaacagtggtttaggcagtaatgcggtctactgtatcagagaaagtaaccgtaacttgctatggatcggtgatgaagaaggactgaacttttattcgtatcgtgaacgccgtatcaagaaacttcctctctggattgataatgaggaattcaaatacatacatgatatttatgaaacggaggactcggaattgtggctggccagtgtggggatgggagtagtcagagcgcgtatcggaggtacaccggatcatccggttcttgaaaagttacaacgatatgtggtcaatggcggagaattcggctctaattacttctttacgatctgcaagggggacagtctgaacctgttgttcggcaatatgggatacggggtataccgcttcaatgaaacgatcaacggattggaaccgctgaccactcataagtatgagaatatgaacttgaacaaggtagtacctattataaaagatgatgcggacaattatttgatcggtactacttatggagtcatcaagtatgcctcagaaaactcttatcaactgtttaatgcgaaagacggttttctgaacagtactattcatgccattctgaggcattcgtccgataacttctggctgagtacgaatcagggattgattaattttgataccaaaagaaatgtattccgctcttacggctttggcgacgggcttaaagtcgtcgaatttagtgacggagcttcctacagagacccgcaaacgggtatactgttttttggaggaatcaacggctttgtagctattcaggcagacggacgtcccgaacagctttatatgcctcccatctactttgacaaactctctatctttggagaacaatacaatcttggagagtttatcacccgtaaaaaagagaatgaagtactgaatttgaaatacgaccagaacttctttgccgtttcattcacctctgtcgattatctgaacggaaataactgcacctattcctataaactgaaaggattgagtgaccagtggattaataatggtaaagaaagttctgtctctttcacgaacatggctcccggtgagtatacgttattggtgaagtactacaatagtgtattcgataaagaaagtgaagtctattctttgttgatacggatcggtgatccgtggtatgcctcttggtgggcgtatctcatttattctttatgtctgcttatgatagccgccatgctggtacgttcattcattctccgcaccaaacggaaaaagcaggaactgctgaatgaaatagagaaacgccatcaaaagaatgtatttgagtcgaaacttcgtttcttcactaatatagctcacgagttctgtaccccgttgactcttatctacggtccttgcggacgtatcctttcatcaaaaggactcagtaaattcgtagtcgattatgttcagatgattcagacgaacgcggaacgtttgaataacctgattcacgaactgatcgaattccgccgtatcgaaaccggaaaccgggaagtgaggatcgaagccctgaatgtatcttccttaatgaaaaatacggcaaagacctttgtcgatatggctaaatcccggaatatcacattcctgagcaagatacccgagcaagtttcctggaactcagacaaaggttttctgaatactattattatcaatctgatatccaatgccttcaagtatactccggatgggaaaagtatcaaaatagaagtggataccaacgatgaaaacctgctggttctccgggttgccaatgagggaagtacgattaaagaagaagactttcaatatgttttcaaccgttatgctatcctggatagctttgaaaaccaggatgaaaagaacttctcccgtaatgggctgggacttgccatttcctacaatatggcgaaattgctgaatggtacgctgaaggtggaaaatacgcctgacggctgggtattgtttactttgtcattgcctccgctggaagtgactaccggcgtatcgtcttctaaacgaatcacttcggaatacattccaaaaatagagtcgcaactggtgctgaaacttcctcactatgaatttgacaagatgcggcctacattgctggtgattgatgatgaactggaaatgttgtggttcatcggggaaatcttctctaacgattttaatgtggtcaccctgcaggagccggaacgggtggagcaggtattgaatgaagtttatccgaatgtgatcatttgcgatatcatgatgccgggaattggcggtatcgaattgacgaaacggattaagtcggtgaaggaaacgtcacatatacctattattatggtttccggccggcatgaaatggaacagcagatggctgcactttctgcaggagccgagatgtatatcaccaaaccgtttaatgccgaatatctccgtatctctgtttgtcagatgttggaacgtaaggaagtactgaaggattatttcagttcagcaatcagctcttttgaaaagacagatggtaaactgacacataaggaatcgaaaaagttccagcaatctgttctgaggattatcaatgaccacattcaggagaaggaactgactccccgtttcatagccgatcatttggctatcagcgttcgcagcctttaccggaaaatggaggagatgggggaagaaagtcctacgattatgattaaggagtgtcgtttgtatgtagcgaaagatttgctgctgaaaacgaaaaagacgattgatgaaattgtattcgaagccggattctctaataaggtcactttctttaaagtatttcgtgaaaagtacggatgcacgccaaaagaattccggaccaaacacttggaagaagtacaataattattggagtggtatggcaacaattagaattttttcgaattttcattcgaaaaaaataatactgagtaattggaggatttttctctttatccctaccagtagcagttttaatttatgaaatagaaagatatgatagtgtcgcatttagtttatatatgagtaaatgtctatgccaaagaagtaaaaaaggaagttcgttctccggttattgttttcttgatttttatcttgattttaatagcggggaatttaacctttaaggagaaatggaatactattaaatcatgccaaaatagtaaatatccctgccgtataatataaaacacaaagaaggaaaactaaaaatcttggcaaacacattaattttgctggtgcattaaaaaggtcagaataatataatatgtttaactaaatatctcatgaaactatgaatcaacaacacgatcctccacctgttttttaagtatgtaatgatccctttttactttttattttatttgaattaaatttaatatcttatgaaatctaatttatttatgaagcgaaagcttgaaatcggactatctttattaattggaacgtccgtttttgggggatgcaataatgacttggctccgatacgccaaagtcagacttttcctcccaatttgaatgcaccaactgtttttgagagtttctctcctgatagtggtggcgtaaagactcaattaattattcgtggacagaattttggtacggatactgcctatctgaaagtgactgttaataataagcgtgctgctattgtaggagtagcggatgatgtaatttacgctattgttcctgcgcgtgctgatactggttatgttcgtttatttgtgggcaaagatgataatgtcgaagaatatgcttcccaaacaaaatttatttatcagtttaaacgtaatgtaacaactttgatgggtagacaagggcaaagtgggcgtgatgacggaccatatgctgaatgtaaactacaacgtccttggtttgctttggcggataaagatggtgccttgttttttattgatgaggggcgtggacaaaataaaaatggtgctttgcgccgtgctcaggaaggctgggtggaaactttggtgcaaaattcgagtggtccattccaaagtcctacctgtcttgcgtttaatcccaagcaggacactctttatatttctaatatgtcctacggaagtgatataaaaactagttttaacatactatatgtaacacgtgaaggtggttttatggatgtgaaagggctatgtaagtttgaaaaagcagaaacgcaaggtttagctgtgcatccacagactggtgaaattttcttttgtaataaatctggtggatatatttatcgctttaatggtcccgattatgaggattatgaaccattattccaaataaacagagcagataaaatagatactcgtatggtttttaatcccgaaggtacggctttattcgtggtagtttgtaacagacattgtatctataaagttccttataatgcattgactcatacttttggtgagcctgaactattcgcaggtggctgggatgaatccggttatgtcaatggtagtggggtgactgctcgtttcgataatccgagacaacctgcttttgatcaggatgggaatatgtttgtccctgaatatggacgacatactattcgtaaaattactccaacaggtgaggtgtctttgtatgctggattacctggtcaagcaggatttacggatggtcttccagagaaggctagatttaataagcctgaatgtgtgacagtttatttagataattcactatatgtagccgatagagataaccatcttattcgtcgtgtaacagtggaataataatgtataaaaagatatattcatgaaaaatacacagaaatatttcatattacttttgatgttgatattacttgttccaagcaatatatggggacaagaaacaaaaaaggaaattatagtcaaaggtgtagtggaagatgatttagggccgataattggtgcgtcagtcgttgctaaaaaccaggcaggtgtgggagtaatcacaaatactgaaggtaagttttctttgaaagtgggaccttatgatgtattggtagtgacttttgttggttatcagccatatgagctgcctgttctgaaaatgaatgatcccaataatgtaactataaagttattggaagatgttggcaaaattgatgaagtggtaattacagccagtggacttcaacaaaagaaaactctgactggggcaataaccaatgttgatgtaaaacagttgaatgctgtaggaagtagtagtctttctaattcattggctggtgtggttcccggtattatagccatgcagcgtagtggtgaaccgggtgaaaatacatctgaattctggattcgaggtattagtacctttggtgcaaaatcaggagccttagttcttatcgacggagtagaacgaaattttgatgagattttgccgcaagacattgaatcgttctcagtactgaaagatgcatcagcaactgcaatatatggtcagcgcggtgcaaatggagttatcttaattaccaccaagcgtggggaaaaaggtaaggtgaaaattaatgtaaaagcaggatttgactggaatactcctgtaaaagtgccagagtatgcaagtggttatgattgggcgcgtttagccaatgaggctcggttaggacgctatgattccccgatttatactcctgaagaattggagataattagatcaggtttagatactgatttatatcctaatattgattggagggatttaatgttgaagagtggtgcacctcgctattatgctaatattagtttttcaggtggtagtgataatgtacgttattatgtctctggacaatataccagtgaacaaggacgttacaaaacgtttagctctgaaaataagtacaataccaatacgacttatgaacgatataattatcgtgctaacgtagacatgaacataactaagacaacagtactgaaagttagtgtaggtggatggttggtgaataggactacgcctactagaagtactggtgacatatgggaggattttgccaaatttactcctttgtctactcctcgtaaatggtctacaggacaatggccgagagtggatgggcaagatactcctgaatatcatatgacacaaagaggatatcatacgaaatgggagagtaaggtggaaactagtgtaaagttagagcaggatcttaagtttattacgcccggtttgaagtttgaaggagtatttgcttttgatacttataatgagaatataataaaacgggagaaaaaagaggaagtatgggaagcccaaaaatatagagatgaaaatggtaaattgattttgaaaagagtggtcaatagaagtccgatgaatcaaaataaggaagttaggggtgataaacgatactattttcaggcgtcattagattataaccgtttatttgctcatgcacatcgtgtcggtgtttttggcatggtataccaagaggaaaagacggatgttaatttcgactccagtgatttgattggttctattcctcgtcgtaatttggcttattccggtcgttttacttatgcttataaagataaataccttgctgaatttaactggggatgtactggttcagagaattttgaacatggaaaacaatttggtttctttcctgctgtttctgccggttatgtaatttctgaagaggcttttatgaaaaaagcattgccatggatagatcaatttaagatcagagcttcttatggtgaggtaggtaatgatgtattggatggtcgtcgattcccttatgtgtctcttatagatactgatgatggaggatcatattcatttggggaatttggaacaaatagagtgcaagcctaccgtattaaaactttggggactcctaatttgacttgggagatagctaagaaatatgatgtaggtgttgacttttctttttttaatgggaaaattagtggtgctttagattggtttttggataaacgtgatgacatctttatgcagcgtaaacatatgccattgactaccgggcttgctgatcagactccaatggccaatgtcggaaagatgaagtcttatggatgggaaggaaatataggatttactcaatctattggtcaggtgaatctccaacttcgtgccaactttacttatcagactactgatatcatagataaggatgaagcagccaatgagttatggtataaaatggataaaggctttcagttaaatcaatcgcgtggattgattgctttaggattatttaaagatcaagatgaaatagaccgtagtccgaaacagacaagtaacagacctatccttcccggtgatattaaatacaaagatgtaaatggtgatggagttattaatgatgatgatattgtgcctttaggatatcgggaagttccgggattacagtatggtgtcggtttaagtgctaattggagaaattggaatttgagtgtacttttccaaggaacaggtaaatgtgatttctttattggcggtaatgggcctcatgctttccgtagtgaacgttatggtaatattttacaggcaatggtcgatggtaatcgttggatacccaaagaaatatcaggcacgactgctactgaaaatccaaatgcggattggccgcttttgacatatggcaataatgataataataatagaaaatcaacattttggttgtatgaaagaaaatatttgcgattacggaatgttgaagtcagctatgattttccacaaacttggacgcgtaaattttttgtaagtaacttacgtctaggctttgttggacaaaatttgttgacatgggctccttttaaaatgtgggatccggaagggactagagaggacggatctaactatccgataaataaaacattctcatgttatcttcaaataagcttttaatcttttgaaaaaacagatcatgaaaaaactagtatattatatattgttatccataagtgcgttatctttttcggcatgtaccgattatattaatgtggataaatatttctacgatcaggtatcattggattcagccttttccaaacgtatttatgttgacggatggttatccagtgcttatagtgtaatgaataagctaggtgaatacaaggaaccgtttcgctgggcaagtgatgatctttaccatcctgatatgaaagaatatgtggaaggaagttatagtgctgataaaccaaagggtgatgaaaatgctggtgagtctcgtttatggaaatattatgaaggtatccgtaaggcatctactttcttggataatgtagaccgttgtccggaactaactatggatgaaatagctgatatgaaaggacaagcccgctttttacgtgcttattgttattgggctttgatacgtgtttttggaccagtacctcttattccgcttgagggactagatgctgacctttcgtatgaagaattgtctttgccacgtgctcattttgatgagatagttagttttattgatacggaacttgccgagacagcccgcttgttacccatgagaagaactgtcaacaatttggggcgtcctacacgaggtgcggctttaggacttcgtgcacgtgtattactttatgctgcaagtcctttatataatggaaatctcgatttcttcaacgtagtagataataaaggaaaccagttgatttctcaaacgtatgatgaatctaaatgggcaaaagcagcagctgctgccaaagatgtaatagaactggctaaaacctcaggtttgtacgagctttacaccatagctcctaaaattgggacattggatatgtatcgtccgccggtgcatcccgaatattctacaaaagattatcctgatggttgggcgaatattgatccgttactttcgtataagtcaaattttgatggttcagttcaaggctccaagaatccggaattgatttttacaagaaccagtgatggaacggggactattaatgattggatgtatcaagctttacccagaacaataagtggaaataaccgtttatgtgtcacacaaaagcaagttaatgcatacgcaatgaatgatggacgcacgatttcggaagctgcaaacacgggtgattatgtgacgacaggttttacaactgaagcatattcggaaaataatccatttctaccggctaaagttagtcttatgtacaataaacgtgaacctcgtttttatgcatctatcgcatataatggttcggtatgggaagcagccagtgcttcggaacctcgatatcgtaatcaacagatcttttattatcgtggaactgaagatggtaaacaaggttttaaagaagaatgtcctcttacagggatgactttgaagaagttttataattcggaagattccagaacagatggtggttatgttatagaaaaaaccgaaatgactattcgttatgctgaaatattgctgatttatgcggaggcattaaatgaattatcggagggggaagtttatcatttaaagacctactctaatgaagatgtagaaataaagcgtgatgaggatgagatgcgttatgctatcaagcgtattcgtatgcgtgccggagttcccgattatacgaatgagacttataaaaatcaagcagattttcgtgtaaaactgaaaagagaacggcaagtggaattgttaggagaaaacagtatgcgttattttgatctccgccgatggaaggatgctttgacagaagaaaatcaattattgcagggttgtaatattaatattagtgatgatgatacttatattgcagacttttacaaggaaactccagtctcttcagtacataaagtctttgaacagcgtatgtatttattcccattcccgacatacgaattaaagcgcaatgtaaatttgacacaaaacccgggttggtaattaaaacagtatcatgttatgaaaaaagtaatgattaaaaatataataaacagccttttactcgttgtcgttttgggagtatcttcttgcaatgatcaattggctgatgaattgtttgaaaaaagaacatatttaatagaaaatggctggaaagattatcaactcgaagtagatgatgacaataccgctatattaccggtttactttggtataaacggcacatctttgaatgataaggatataactttgactttagatgtagatcctgatacacttgaaagatataattgggagaaatataaaaatcagaaagaactttatttaaaactattaccagaggaatcttatacttttgatgcaagctcatggactattccaagtggtgaattaaacacgtcagcatatataaagatttcattggataaaataaaagaagttggtagtttatacaatgattatgtattgcctctcagaataaattcttcagtaggagagccgatagggagaagtaagtacacgaaagtattggcacatattgcttttaaaaatgatttttctggtcagtacacaggaaaaggtgtcataaagcaaatagggacaagctttacaacggatataaccagcaccaatatctatgctatcaatcagaatacatgttatatgtttgttggcgacaagactcgtgaaaaaacaacgaattatctagattatgttgtcgaaattaccaaagatgacgaaacaggtacttttgtgttaacttctccagtggaaagtttgaagtttaaatcttattcatctcaaataagtcgtaaatatacattgaattatggtgatgacagatattatatagaaattacaactgttgatttttcttatgaatatcaagactcatcttataataatgagcctgtgctaatgaattttcaaggaagttttacgatgactaaaaacgtatggaaatatcaatatccggatgtggatgtagaagattaagccatggttgctggaatgaaaatatcagtggctattctaactgtttgtttaaaccctaaattttgtatatatgaaaattgtgaagtatatagttatcgtatcattatttagtatttctgcatgtagtgatgatgatgataaaaaaaacaatgagcgacctgggaatcttgtagagttacaggttgatgtaaatgagattaatattgcgcaaggagatacccgtactgtaaacattacgtcaggtaatggggaatatgttgcgacttcggctaatgaagaagtagttgtcgcagaaatagatggaaatgtggtgaaactaaccgctgttgaggggcataataatgctcaaggagttgtttatgttagcgataagtatttccaacgcactaaaattctagttaatacagcggcagaatttgaattgaagttgaataaaactttgtttacgctttattctcaagtggaaggatctgatgaagctctcatcaagatctatacaggaaatggaggttattctcttgaagtgattgatgataaaaattgtattgaagttgatcaatctacgcttgaagacacagaatcatttatggtgaaaggcattgctcaaggtaatgctgagattaagattactgaccaaaaaggaaaagaagcttttgtgaatctgaatgtaattgctcctaagcaaattacgactgatgctgacgaaaagggcgttctgataaattctaatcaaggatcacaacaagtgaagattcttacaggtaatggagaatataaggttcttgatgctggtgatgcaaagatcattcgtttggaagtttatggtaatgtggtaacggtgaccggaagaaaggccggagagacttcatttactttgactgatgcaaaaggacaagtttcacagactattcatgtaaagatcgctcctgagaagcgttggtatatgaatttaggaaaagagtatgcagtttggactcactttgcagagatgactggtgagggactagaggctgtgaaagttgaaactaacggctttaaacttaaaaaaatgacttgggagctagttgctcgtatcgatggaactaattggctacagacctttatgggtaaggaaggctattttattcttcgcggtggtgattgggaaaataataagggtagacagatggagttggtaggtatagatgataaactaaaactgagaactggacatggagcctttgaactcggaaaatggtctcatattgctttagttgtagattgttcgaaaggtaaggatgattacaatgaaaaatacaagctttatgttaatggtaaacaagtaaagtgggacgatagccgcaaaaccgatatggactattctgagattgatctttgtgcaggtaatgacgggggtagagtatcaatcggaagagctagtgacaacagacgctttcttgatggtgctatactcgaagcacgtatctggacggtttgtcgtacagaggaacaacttaaggctaatgcatgggagcttcatgaacaaaatcccgaagggttattagggcgctgggatttctcggctggagctccgacatcttatattgaggatggtaccaattcggatcatgagttgctgatgcatatttcgaagtatgatagctggaatgccacagaatttcctatgagcagatttggggaagctcccattgaagtaccttttaaataacttttaaattcgaagaaaaatgaaagcaatattcaagctgttgatattgaactttttgactctgtttatctttccgtcttgcagtgatgatgataagtcaaagtctgaattgaatgaccccatcagtggcaatatttctccggtaggttcatttgcggtagaagctaccaataacgagaatgaacttctggtgaaatggaccaatcccagtaatcgcgacgtggatatggtagaactctcttacagggacgtggaagcgagtttgtctcgtgctaccgacttctcgccgggacatatcataatacaagtagagcgtgatgtcacacaggaatatatgttgaaggttccttattttgctacttacgaagtttctgccgtagctatcagcaaagccggcaagcgatcggtacccgaaagccgtgtggtgatgccttatcatgaaaaggtggacgagccggaactgaaactgccggaaatgctggaccgtgcacattcttacatgacttctgtcattggatattatttcggcaagagttccagaagctgctggcgtagtaattatccttatgatggaaaaggttattgggatggtgatgcgttggtctggggacaaggcggtgggctttcggcatttgttgctatgcgtgatgcaaccaaagagagcgaagtggagaatctttacggtgcaatggatgatatgatgttcaaaggaatacagtatttctgtcagctggatcgtggaatcctggcttattcctgctacccggctgccggtaacgaacgtttttacgatgataacgtatggatcgggctcgatatggtcgactggtatacggaaacgaaagagatgcgttatctgacacaggcaaaggtggtatggcgctacctgatcgatcacggttgggatgagacttgcggaggaggtgtacactggagggagttgaacgaacacactaccagcaagcactcttgctctaccggacctactgctgtgatgggctgtaagatgtatctggcaactcaggaacaggaatatctcgactgggcgatcaaatgttacgactatatgctggatgtattgcaagacaagtccgatcatttattctatgacaatgtacgcccgaataaggatgatcccaatctgccgggtgatcttgaaaagaacaagtattcctacaactccggacaaccattgcaggcggcctgtctcttatataagattaccggcgaacagaaatatctggatgaagcgtatgcgattgctgaaagctgtcataagaaatggtttatgccctatcgttccaaagagctgaatcttactttcaatatccttgctccgggacacgcttggttcaatacgatcatgtgccgtggattctttgaactttattctatagacaatgaccgtaaatatatcgatgatatcgaaaagtcaatgattcatgcgtggagcagtagctgtcatcagggtaa

SEQ ID NO: 4605 - DNA, 266 bp, Unknown
  gut microbiota DNA sequence
ctatacagagctttttagtttctcccgcttgaaacttttgtttctcatgcttggaactaaagtttcatcggcttgaaactttagttccaaagccgtgaaaccaaagtttcggacgcttgaaaacagtggttccagcctatggaatgaatgaaacaaggcaggaaactgatgccttacttatatgattcaattaacttgaccgcaccaactgttcgattaacctactcttccaagaaacaataaatcacttatcactcaaaaacagc

SEQ ID NO: 4606 - DNA, 206 bp, Unknown
  gut microbiota DNA sequence
tatcattatctgtcatttgtttgatgttgtcatttgatttacagtgtattaatgtctgaggtgtcaattattaatgattgatatttcagacattaataattgataaatcatcctttaatagttgataactcagctgtttttgagtgataagtgatttattgtttcttggaagagtaggttaatcgaacagttggtgcggtcaagtt

SEQ ID NO: 4607 - DNA, 17253 bp, Unknown
  gut microbiota DNA sequence
cgataatcgctcacattgaggaaatagtaaaatgccgtatctttcagttccacatgtcggtgcttgtctacatattgctccggtgacgcctctttcaatggaatcaggtccagaacatccgtaaccggaacccatttattgtaaaagtattcatacttcaccgcattctgcaaactatatttttccagactttccacagcatcctgtttttccgtcttgtaccatctgcgaacattgttcagctgaggtgccgtcaacggtactttaataaacaatcccttgatcagcggagattccagtttaaacaattccttgtttttctcataataatccgctatttcctgttccgaaatatcattcgtcagtttttggtttatcaattcctgctgataggtatgcataatcaaagctttccggtaattctccaccagcttatctacatccacattatccggaatattattcgcagctttttcatacaacaaaatctcctccgcccagctacgaatgtaatgctcggcgaaaagaatgctatcatcttttgacaatccgaccggtagtacagacatcaaatcttctttatacaaaaagttaccatctacctccaccaatgcagtcttgcctttgtggtcgtactgctctttgcacgctccacaacagagaagggtaattagtaagaggactaatattcgcattgtcaattcaaatctacttatttaaggtacgaagatagtgaataatcggttacatcagttattattaactgtttttaaaacctcttggtttatttcaaccttaccagactccctcaattcttgctcccaatatgcgttaagatagcttctataatcttttctcacctgatcaattacctctctgtaatcctccggtcccttctgttttttgcctacagcaatagtaaaaggataagacactacagggtcaaaagtgcccttcttaaagaccaatttatctatatatttattatctccgtcggcaaaaacaccctgttcaattttaattgtttcagcaccggatgtattaaatgttttgcgaagcatatcctcccattcattctccggaacttttttcagtagctttttagcctgtttagcagtctttttatctgcacaatgcaacactactcctttgtatcggggatgctcccatcggtaatccgatgaatgaaacttaaaataagtagccaatcccgcccggtcgttaacagccggtaaatctactttctgatgcacgatttcctcagccagacatttctcagcatattcctgcaaagtataacgaagttccggatgttttctttccatatgctgactctcataatccagcagagattttgctataaagccattcaactgccgttttacagcctgaggatgggatgaagcaaaccgcttaaacatttctcctgtatatgcctgcccgttgatggtaaacaaagcccgttccgttccacctttctgcaatacttcttccaaagactccatattgggaatatactggtattcctttttcaattgctctacgatggcttccgttcctttatccaacggctgacgccttaaacgattcagaagactgtcactaacgacttcatatgcaggcacttcctttcgatctatgactttcagaatatgaatcccctccggagtaaaaaaaggtttggatatttcaccttttgctaaagagaaagcagcctcctcaaactccgatgttgtctgtaaactttctatccaccgacaacgtttatcatccgaaaaccgatctaccaaacgggcaaaattcacactcggctgattttgtatcacctgataaatagagtccatgcgagcctgttcctcctgtaaatgccgggatgtaatggtctgaggcagatatttgtaaatttgccgtatctgcacttgtccgccacgtacattttccttcatcttctgatatagaatacgggcattgccatccatttcctgatcatccagaaggtatgacctcagcaaatttgtccgataagcctgctgttgcttgcgaaaagccgaagtagtgtcgagtccggccgctctggccgcttccactttcaacttagacagaatgaaaagctccgcatattctctaggagacaatttcgtaccattaccgtccgtatgccggcgataggagcattcaaactccgaacgaggtatttctttcccattaatccgcatcactacggaatcttcctgagcgaaagctaatactccgaagagacttatccatcctaaaagcagatttcttttcatcattgatttttatttaaaaacgacaaacggtgaacaacgaacatatgccatacagcctgttcaccgttcaccgttaatcgtttaccgtttatataaattattccggacggctatagttaggtgattcactggtaatcgtcacgtcatgcgggtgactttccatcactccggcatttgtaatacgagtaaacttcgcatcatgaagtttttcaatattagcagcaccgcaatatcccatacctgcacgaagaccaccagacaactgataaactacttcataaagtgtacctttataaggaacacgagcagcaataccttccggaaccaatttcttcacgtcggcagttccactctggaaataacggtctttagagccattctccattgcttccaatgaacccataccgcgatatgatttgaatttacgtccgttaaagatgatagtatcacccggagactcttctgttccggcaaccaatgatccgatcatcacacagtatccgccggcagccaatgcttttaccacatcaccggaatagcgcaaaccaccatcagcaatcagaggaacacctgtacctttcagtgccttggctacatcatatacagccgacaactgaggaacacctacacctgcaacaacacgagtcgtacagatagaccccggaccgatacctactttcacagcatcagcaccagcttctgccaaagccttcgcagcttctccggtagcaatgttacctaccacgatatcaatattcgggaagcgtttctttgcttctttcagtttctcaataacgtacatagaatgtccgtgagccgtatcgattacgatagcatctgcaccggcatccactaatgcctgcatacgatccagcgtatcagcagtaacgccgacacctgcagctacccgcagacgacctttggcatctttacaagccatcggtttatcttttgcctttgtaatatctttatatgtaacaagaccgatcagtttgccatccattcctacaatcggcaacttttcaatcttatgtttttgaagaatctgtgcagcagattccagatcggtagactgattggtagtaaccaatctttctttaggagtcataacaagatcaatatgctttgtcatgtctctttcgaaacgcaaatctctgttagtaacgatacctaccagataaccttcatcatccactacaggaataccaccgattttatattcagccataattcccaaagcgtcactgacagtagaacctctcttgatagtaacaggatcgtaaatcataccattttcagcacgctttacaatggcaacttgtcttgcctgctcctcaatagacatatttttgtgaatcacaccgataccaccttcacgggcaatggcaatagccattttcgcttcggtaaccgtatccatggcagccgtcacaaaaggtatttttaactcaatgtttcttgaaaactttgtcgagagatcgacagtgcgcggtaaaacttcagaataagcggggatcaacaatacgtcatcgtaagttaacccatccattacaatcttatcagcaataaatgacatagggctgtgcgtttaaaaatttattgcgtgcaaatatacggtttttattcaaaacagcatacctgcacgcctatttttttcgcttttttaattagccatttcagagatgaacttgattctcaccagtcggacttcctcttcggtaaattcatcgcccagttcgtcaagagcatcatcaatcttgtctgtcgtagattccttgaagtaatcatagatatcgagcatatgatcttcatccataatttcttccaggaagtagtcaatattcagtttagttccggagtaaacgattgcttccacttcatccagcagttcaccaaactcgattcctttggaaagagcgatatcgtccagcgccactttacggtcgatagcctgaatgatagccaccttcatctttgacttattggcaaccgtacgtacacgtaaatcttccggacgttcgatttcattctcttcgcaatgacgtttgatcagtttacagaactcttcaccatagcgtttcgcctttccggcacctacgcccggaatattctgcagttcatccaatgtcaccgggtagatggtagccattgcttccaaagacggatcctggaaaatgacataaggaggaacttccagtttcttggacagcttcttccgtagatccttcagcattgaataaagagccgggtctaccgcacaagagccaccgccacgtgcaggtacttcttcttccgtttcttcaaaatcattatcttcagtaatcttgaatgattttggcttcttcaggaacttatgcccctcttccgtcactttcaagagaccataattctccacatctttgctcaagtaaccgccaatcaaagcttgccggatcactgcattccatgttttgtcttcttcgcccatacccgaaccgaacacttcgaggtcttcgtgtaggtgagcctgtacttccgacgtttctctaccttgtagtatgtctatgatataatctgccttaaaattttctttcaccgcgataatcgcttcaatcacggcacataataactcttgagcctccacttgttttttagggtttaaacagttgtcacaatttccacaattttcttccgtatattcttcaccgaaataatgcagcaatgtcttgcgccggcacacggaagattcggcataagcagcggtttccaacagaagctgcttgccaatttcctgttctgccacaggttttccttgcatgaacttttccagtttctgcaagtctttgtttgtataaaaggtcaggcactgaccttcgccaccgtctctaccggcacgtccagtctcctgataatacccttccagactcttcgggatatcataatggatcacaaaccgtacatccggcttgtcgattcccataccaaaagcgatggtagccacaatcacttccaccttttccatcaggaaatcatcctggtttttcgttctcgtcattgagtccatacctgcatgataaggacgcgcgtttattccgtttgcctgaagaatttcagcaagttcctctactttcttccgactcaggcaatagataatgcccgacttttccgagttgttcttgatgaacttgatgatatctttatcaatattgttagtctttgcgcgtacctcataataaaggttcggacggttgaacgaagatttgaaaacctgtgcatccaccatccccagatttttctggatatcgtgctgtaccttcggtgttgctgttgcagtaagcgcaatcaagggagctttccctatttcgttaatgatcggacgaattcgccgatactccggacggaagtcatgcccccattcggaaatacaatgagcttcgtctaccgcatagaacgatattttcaccgaacgcaaaaaatctacgttttcttcctttgtcaatgactcaggagccacatatagcaattttgtttttccggcaaggatgtcagaccttacttggtctattgcgcctttatttaatgaagaatttataaaatgggcgatgccatcctcttcactgaaattgcgcattgcatccacctgattcttcatcaacgcaatgagcggagaaataacaattgccgtaccttccatcaagagcgaaggtaactgatagcataaagattttccgccaccggtaggcattagcacaaaggtatctttaccatcaagcaagttctgaatgattgcttcctggtttcccttgaacttattaaatccgaaatactttttcagttcatctgttaaattaatcttccctgccatcttaacttaggttgttttattcagttcatggtttaactttaagtaaagccctccattgcaagagagccaaacaaagttataaacaacttcgtaattaccaagcaaaatacgactaatattttcaagaaaaaacagaaacaatcatttttaatagccttactatttgatattaagcagtttgcagccttgccatattcgctttttccagctgttgttttgcataatccagcgttaccttatactcttttttgctctctgaagggatttcaaacatgacatccatcatgattgtttccacaatagaacgcaacccgcgggcacctaacttatattctacagccttgtcaacgatatattcgaaaacagaatcttcaaatgtcagcttgataccatccatttcaaacaacttgatatattgcttgatgatagagtttttcggttcggtaagaatagcacggagtgcattgcggtccagcgggttcagataagtcagcaccggaagacgaccgataatttcgggaatcagtccgaatgacttcaaatcctgaggagcaatgtactgcatcatattattcttatcgatcactgccgttttttgcgatgcggtatatcctaccacatgcgtattcagccgttgggcgattttcttttcaataccatcgaaagcaccaccacagataaagagaatgttcttggtattcaccggaatcattttctggtcgggatgcttacggcctccctggggaggaacgttcaccaccgatccctcaagcaatttcagcaaaccttgctgcaccccttctccacttacgtcgcgagtgatagaaggattgtctcctttgcgggcgatcttgtctatctcatcgataaacacaattccttgctcagcctccggcacattatagtctgccacctgaagcaaacgggtcagaatgctttcaatatcttcaccgacataaccggcttccgtcaataccgtagcgtctacaatcgtaaacggaacatgaagcaacttggcaatagtacgtgccagcaatgttttcccggttccggtactacccaccatgataatgtttgatttttcaatctctacatcatcaccgctgtctttctgcaaaagacgcttataatggttgtaaaccgatacggaaagaaagcgcttcgcatcatcctgtccgattacgtactgatcgaggaatttctttatttctaccggtttgggcagttcttttaagttgagtttggtagctccggccctttttctgccttcgcccagtgcttcctgagtaatctcataagcctgggtagcgcagctgtcgcagatatagccgttcattcctgtgatcaggaatccgacttcattctccgaccgaccacagaagctacactttttctttgtctttgaatcagccatttttattttttaatcaatacttcatcaatcattccgtattctttcgcttcctgagctgtcatccagtaatcacggtccgaatcggcccataccttatcaaagtcagtgtgcgaatgatcggcgatgatcgtataaagttctttcttcaatttctgaatttcacgggctgtgatttcaatatctgaagcctgtccctgcgcaccgcccatcggctggtgaatcatcacacgtgaatgcggcaatgcagaacgtttgccttcggcaccggctaccagtaatacagcagccatcgaagcagccatacctgtacagatagtagcaacatcacttgaaataaactgcatggtatcgtaaatacccagtccggcatatacactaccacccggagaattgatatagatagagatatccttacccgggtctacagagtccaaatagagcaactgcgcctgaagcgtgtttgccgtatagtcatctacttgtgtacccagaaaaataatgcgatccatcatcagtcgggagaatacatcgagctgagttacattcagctgtctctcttcgagaatatagggattcaaatacccggcttgcgatttaatcacatcgtccagcaccatgccattcattcctaaatgcttggttgcgtattttctaaaatcatccatgttattgttcctttctaattaaatttattataaacgtaagtgcaaagaaacgaaaaagaacacatagacacaaaaaaacacagagttataattttataaaaactctgtgtttctgtgactttatgttctattcaaccgaacgattattcaaacattttattgaattcttccatagaaacgttcttgttctccaaagtgacctgagctttcaaagctgcagccaactttacttccactacgcggcttaccaggttgttaatagtatctttcttcttcaacatttcctgtgcatagttatcaagtacatcttcggggacagacaacattccgtattgagcgaactgtgctttggtagtttctttcgccatcttcagcacatcttcctgctctactttgatatcgtttgcctctaccagctgttccttgatcaggtgccaagtcagttcttcgatactcttatcgtagttttcagctacatattcttcgcctttttcttcgttgttcagcaacatgatacgtttcagcaatgcatcagagaattccagcttacctactttgtccatcatcactttacgaatgtcgatcaggaatttataatcgctgtcagcaacaaatcttgctgcgatttcttctttgatcttagcgcggaattcttcttcagtcttcactacaccttcaccaaatgcttggtcaaatacttcctgagtcagttcacccggtacgaaacgagtgatttcttctacctggaagctgaagtcagacttcacatccttagcgatttccttgtcgatcttcaacagagaaccaagttcagcagcgtgtccgtcgtaagcaacattcgggttgaataccagtacatcatttacttttgcattagcaaagatagctttctgatcgtcgttcttcatataagaaggcattaatactgcaccttctacctgaataccgccttctttcgtattaccttcttcgtccagctgagccaacagacctttcagcatgtcgttatcttcgtaaacgtccactttgtcgtatttaccagtgcgctgagtatacatcttcacctggttttcgatcatttcatccgatacttcgatcgtatagtaatccactttatctttagcgcttacttcagctttgaattcaggtgccagagcgatatcgaacacaaactcgaattcttccattgtatcgaagtcgataacctgctgtttttcttcgttaggcaacggttcgcccagcatgttcaccttattttctttaatatagttgtaaacagcttcttgcagtaccttattcacttcttctgcaatcactgatttaccatacatcttcttaaccaggctcatcggaaccattcctttacggaatcccggcatttgtgccttctgacggaatgatttcaacgatttgtctactttttcctgatagtcggctttctcaagcttcacagtaagctgtgcgcttactttgtcaatgttttgtaatgaaacgttcattctgacaattatttatttgatttatactttgttctaactcaaacgagggtgcaaaattagtgctaatctttcaattttcaaaagacattgcagatttatttcgcatctattttggaatatccaagtgacaattgcatgacaggcagcggttcactagccacgcatccttctttttttctcgttacctgcaaattaaagtaagaaaaagatggtcaatccaaaaattattcttttctttgctgcggattgatggaccattagtttctcgatttgattacaaggtttttacttctgtttcgaaaacgcatttgtaaactctctgtcgttttaatctttttattagtaaccatctatccagagagttttattcatttatttatttttttatcattttcattatgaacatttatgttggaaaccttaactaccgtgttaaggaaggagatctgcaacaagtgatggaagattacggagcagtatcatcagttaaagtagttatggatcgtgaaaccggtaaatccaaaggatttgctttcatcgaaatggaagacgatgcagcagctgctaaagcaatcgcagaattgaacggtgcagagtacatgggccgtacaatggtagttaaagaagctagacccagagcttaattgccgacgctaatatagctaagaaaaaaaagaaacttctgccacatgatgacagaagtttttttatgtccttctatttacttttccgtcagccttccatattctgcacttccatatccttcactttacgaagcaggtccgaagcaaagataaagttattcagccgttcattggtagaagtgaagatatcatctttcgtcccttcccattctttatgtccttcataaatataaatcactttctcaccgattcccagcacagaattcatgtcatgggtattgatgatagtcgtcatgttatactcctgagtgatgtcatgaatcaagtcgtcaataactaatgacgttttggggtccagcccggagttcggttcgtcacagaacaggtactgcggattcaatgcgatagcacgggcaatggccacacgcttctgcatcccaccactgatttcacccggaaatttatctttcgcctcggtcagattcacacgttccagacaaaacatggcacgcttggtacggtcacgcagtgtatcgttgctaaacatattcagcgggaacattacattatccagcaccgacatggagtcaaaaagcgccgcactctggaaaatcatccccatctccttacgaagcatctttttctccttcttccccatcaggacaaggttacgtccgtcatacagcacttctcctttttcaggagtaagcaagcctacgatacatttcattaagaccgttttaccggagccgctctgaccgataatcaggtttgtctttccattctcaaaagacgcattgatatcactcaataccgttttatcctcaaatgatttataaagtcctctaatatcaatcatcccatcaaaagtttagttaataccaaatctgcaaacagaatcaacacactactgcttaccacagcatccgtagaagcctttcctacagcaatggaaccaccatctaccgtataaccgaaaaaggcagaaacacttgcaataataaaggcaaagaaaagggattttatgatacccgcccagataaaccattcgacaaacatatactgcaatccatattccagatcgaccgcattcatcacaccggcaaaccaacaggtacaaaaagcaccgatgataccggcaaaaatactaaacgtcaccaatacaggaatcacagttaccatggccgttattttgggtagtatcagataattggcggaatttatacccattatttcaagtgcgtcaatctgctgcgtcacccgcatcgttcccagttctgaagcaatgttcgagcctacctttcccgccagaatcaaacacataatagaagaggagaactccagcaacataatttcacgagtcacatatcccactgtccagcgaggcatccatggactttcaatattcaattttatctgaatagtaatcaccgcgccgatgaaaaacgaaatcaacaacacgatgccgatggagttcacacccagttgctccatctcgttaaggtattgccggaaaaacatacgcatacgctcgggacgggaaaaagtacgtcccatcagcatgatatatcgtccgacagttctcaatgcttttatcataactcacactatttgtctgcaaatgtacattatttcagcttatttttactacatttgccgcaaaataactagaatatggaagaaagcaagatggtgcttcgcacggaagacctggttaagaagtacggtaaacgaaccgttgtaagccatgtatccatcgacgtgaagcaaggtgaaattgtgggtttgctgggaccgaacggtgccggtaagacgacttcattctatatgaccgtaggactgatcactcctaatgaaggacgaatcttcctcgacgaccttgagataaccaagtttccagtatacaaacgggcgcagacaggtatcggataccttgcacaggaagcctccgtattccgtcagatgagtgtagaagacaatatcgcttctgtactcgaaatgaccaataagcccaaagattatcaaaaagacaagctcgaaagtctgatcgctgagttccgccttcagaaggtacgcaagaacaagggtaaccagttgtccggaggtgaacgccgtcgtacggaaatcgcccgttgtcttgccatcgacccgaagttcattatgctcgatgaaccgtttgccggagtagaccctatcgcagtagaagatattcagcagattgtgtggaagctgaaggataaaaacatcggtatcctgattaccgaccacaatgtgcaggaaacattaagtatcactgaccgcgcttatctgctgttcgaaggcaagatcctgtttcagggaacaccggaagaattggcagaaaacaagatcgtgcgtgaaaaatacttaagtaacagtttcgttttgcgccgtaaggacttccagttaaataaagacgaataatcctcataaataaaaagaaattgcccggcaatgaaatattgccgggcaatttctttttatttatacgaatataccttttacttctgtcggatataaatattgatcggtgtaccggtcagattccacttctcacgcattttattttccaggaaacgtttgtacggttccttcacatactgcggcaaattggcgaaatatacaaatgaaggcacttgtgtattcggcaactgcgtgatatatttgatcttgatatatttacctttattggaggggggtggatatgcctcaatcaacggaagcatctcttcgttcagacgggcagtcggtatcttcgtcgtacggttttcatacacgttacgggcttcttcaagcactttcaggatacgctgtttggtcaatgcagaagcaaatataatcgggaaatccacaaagggagcaaaacgtgaacggatagtcgcttcaaactccttcatcattttcgccgttttatcctctatcaggtcccacttattaatcacgactaccagccccttctgatttttctgaatcaaagaaagaatattcaaatcctggctttcaacacctcttgtagcatcaagcatcaaaatacagacatccgcgttttcaatcgaacgaatcgaacggactaccgaatagtattccaaatcctcgttcaccttattctttttacggataccagctgtatctaccagataaaaatcaaatccgaatttattgtaacgagtataaatagagtcacgggttgttccggcgatctccgttacaatgttacggtcttctccgataaacgcgtttacaatagaggattttcctgcattcgggcgtcctactacagcaaagcggggaatatcatcatccagaatttccgaagtctctttattgaatttgctgacgatcaagtccatcaaatcacctgtaccacttccggtgatagcagagatacaatacggatcgcccaatcctaatttataaaactcaggagcgttatattgtaattcattattatccgtcttgttggcaaccataatcaccgggctgttagcacgtcgcaagatagtcgcaacctgcatatccaggtcagtcactccgttcgtcacatccactacaaacagaataacgtctgcttcctccaccgccagcaatacttgcttccggatttcctcttcaaagatatcgtcagagttcactacccatccgccggtatctaccacggagaactcacggcccagccattcggacttgccatactgtctgtcacgggttgtacccgcttcttcattcacaattgcctgacgagttttcgtcagacggttaaataaggtagacttgcccacattaggacgtcctacaattgcaactaaattattcatagctcaataccttgtttttcacgactatcccagtcgcatgaatactcttaatctaactgataaccaaagttccgcagttccttatccgaactacgccaatctttatcaaccttcacataagtttccaggaaaatcgtctttccaaagaaacgttccaattcccggcgtgcttcggtagctacttttttcaatgcttttccctgcttgccgataatgattcctttttgtgaatcacgttccacataaatcactgcccggatatgtatttttttcgcttcctctttaaattcttccactactacttccaccgaataagggatttccttatcataatatagcagaatcttttcacggataatctcattcacaaagaaacgggcaggcttatccgtccactgatccttgccgaaataaggaggagaatcaggcaacagttcctgaatacgcttcatcacatagtctacattaaacttggatgcggcggaaatagggataatctcagcctgcggaagcaactccttccactcttcgaccagtttgatcagcttctcctgatccgtaaggtctattttgttgataagcaacaggacaggaaccgtcatctgacgcacctttcccataaactcattattcttatcgggcgtctccaccacgtcagtcacataaagcagtacatccgcatctgtcaatgcagaggttgagaagttcagcatcgactcctgcaacttatagttaggtttcaatactcccggagtatcagaaaaaacaatctgcatatcatccgtattataaattcccataattcggtgacgggtagtctgcgctttgaaggtagcaattgatatacgttctcccaccaaagcattcatcaatgtcgactttccgacattcggattccctacgatgtttacaaaacctgctttatgcatttctctttattttattggttgagacaaaaaaacgcatcgaatcgaaataggatgcgttttttgtgttataattcagtaacttacgttacgattccttttttccgtcataaccccattttacataaaccgcaccccatgtaaatccggcgccgaatgctgtaaatataatgttatcacctttctttagtttatcttcaaaatcccagatacacagaggaagcgtagcggcacttgtgttaccataatgctcaatgttcaccaacactttatccatcgggagttccatgcgatgagccacagcttcaatgatacgtacattcgcctggtggggaaccacccagttaatagtatctttagtcagaccattcttttctgcaattgcagccgatacatccgacatacttgaaaccgcatatttgaacactgttcttccttcctggtgcagatagtgcattttattgtctacagtgaaataagacggaggacaaaccgaaccaccagctttcatgtggaggaaaggcaggcctttaccatcagttctcaatatcgaatccataacacctaaatcttccgtagtgggctccatcataaaagcagcggcaccgtcaccaaagatagggcatgtagcacgatctgtatagttaaccattgacgacatcttatcggcaccgacaatgataattttcttatatcttcccgaacgaatgaagttagcagctgtttccatcaaatacaggaaaccgcaacaagcggcctgcaaatcgaaagcaaatgcgtttttcagtccgagtttatcgcaaagaatagaagctgtagaagggaagtgatagtcaggagtagtagtagcaacaataaccaaatcaatatcgtcaggattggctccggtcttcttcatcaactgcttggcagctttgcgtgccatgtatgagctacctaatccttcctcattcagaatatgtctttcctttactccaatacgagtcataatccattcatcgttggtatctaccatttttgatatctcttcattagtcaagatataatcgggtacatatcctccaactcctgtgattactgcatttattttttccatcaaacctattttaaattagcgatactataatacttaaagcagccggagagttttccccctcggctgtcttgagtatactgtactaattatacagctgcttctttttcgatagcgagcttacctctgtagtaaccacatgcgccacatacagtgtgataaacatgccattctccgcaattcggacaaatagccaatgtaggagctactgccttatcatgagttcttctctttgctgttcttgtttttgattgtcttctcttaggatgtgccattttcttaaaactttaattattatctaatattttttttaattcattccaacggggatcaatttgttcctccatttcctcctcaactacgatatcatctccacctgtttcgaagacttcatcgctatcttcattggcatctgttttgagatgcttgctcaacttgctagtaacagctttgttgcacttacccggagcatgcacatgcttcattgggatagagagtgcaacgaattcatacatgaaccatgcaacgttgatttctccctcttcttcagggatcacaatcaggttgtcgccttcctctgcatattcatgtccaaacttcaccatcagtttgtcagacgaagtgatctgtagctccatttcgtccaggcaacggtcgcatggtacccatactataccgtctgtctgaaagctcagttcgaaagcacgagaggttcttttcacagtcaaagtaacatttacttttcctttctgaacttcaggaccatcaatgtgggcgaagtaaaggttatccaaaacaaactcatacttagcagagtctgtttgcatgcctttcaaatcaattttgtatttatcaaactttcccaaagcttctctcttttttaaatcgttagattacaattcgggcgacaaagatacaaataaatatcctcataacatacaaattaccagtaaatattcacttttttaataggtattatgaggattattgctgttaaaaatgatgtcacaaatttcagaaggacaaaaaacaataaagcccttc

SEQ ID NO: 4608 - DNA, 4953 bp, Unknown
  gut microbiota DNA sequence
cagtaaaagctttgagtgaatcaagtttccctacatagattttttctccctcgtctagataaggctgaataccatccagcatgccattacatgaatagaaaaagcacaggatactacagagaatcaatatatttatttttttcatacttttgctttgttaaaaggttattgtatcggggttccgtagaaccaaagttgctgcataactaccaatccggcaccgtcatgagtagaaagtattttaaatcgaatgtatcttactggaggaatatctgccggaaattcaaattcttctcctttactagcatatgttatatcttcttctgaatttgaaccggcgggccatccggaaggttttatactttcacaatctgccagtttggtccatccgtcccaacttccgtccgaagatggtaaatcagaacgtccccatacttcccattctttgatagcacctgcacgatagtaataactacctcccatggagcgttgccatgaggtgaagcggcttaattgagcggtttgacccatatcgaatgtaaaccatacaggaaactcggaaggattaaagtcataaccgtgagcataattccaactgtttaatccatgatctccattgaataaagactccaaagtatgacctgcgttgtccatctttatatcattggctagatagaaagttttgaatttggtcaaatccaatttttcttcatatagtggtgtcaaggttgttaagtattcctctgactggttatcatatagatcgcggacacggactttaaaatcatgtggttcggcagagaaccctcggagtgtaaagccgatgttttttacagaagtatattctgtatgttctacattccaattaccttttgaatcttttgtagagacatcaaagatgagatagtttctgcctccatttgtagtatgtatataaatacctccgaatgtaggatttacctctatttcttcaatggcagtaaggtatgccggttttccaggtactatttcggtgatgatagcttctccttctttctccattttgttaacggctgagattactagttttttcgggttcgtatttccgaaaccttctattgtcgtttcatcagtatagagagaagcacgtgcttccatttcttttccattgtcaagtgtatattttattttgatatacaatagatcttcgtctgttggagcaatgaatttcaatgtcactccaccaggaatttgttcataggaagtcacttgtactgtaccaggagcatgtccactgccatccccataaggtttatgagtttctacatcttcgcaactgtgtagcaatactgccgcacatgctatccatatataatataagattctttttttcattgtttttcgatgtttataattaccatccatacgtttgaattaatttgtcgtctacttgtaagtcttgtttttttataggccacaaatagtctttagttgtaaatgcgcgaggaacaaagagagttgtgactttataaaagtcttcctctatttctccttgtacgttccatcctttaatggatttactcagttcttttgaagcgtctttccatcgtctgagatcattgtattgatgtccttccaacgcaagttcaattttacgttcctgtttgatgatacttctcatcccatctttagttttaggtttggtaggatcattgctgtacttttcccatgctactctgacatctcctatatcttcggtctgtccaagtacaccttttttcaatccagaacgttcgcgtaccttccgtaggtatgtataaacttcttccggtacattattatcaccttctgtagcttcattaagtgattctgcatacattagatacaagtcgcctaatctgataatagggaatgggtattcgtagactacttgtgaagattgagttatagcattttgataatatactacttttttagcgaaataacctgtaatggagtagttaaatccccatttgtttccagagtttcttccatatttaccatctacataattcaagtcattgacatctgtacgtccgttaccataccaagtggaaccatcgaaaccgagagacccgtagaagcggggttctctgttgaagtgaagtacggcagtggtccagcctgttcgcatgttatatttatcagcactagtcacttgtcgggttgtgtaacgattatcatagtttccgcttgttaaccattctttgtcttcgtcaatgggcactccatttttactgtaaaattgttctgcagtttccagtgtaggagcatatacacctgctgccctgctttgcaaaatactgcctgttacttgaccgtttccacttccttgttgcaaagaaggaacgatacaagccatcgataggttttgcagttcattggtaccctgtttgcctacgctccatatcaattcggagttaaaacgttctgttactgtttgacgaatattcatgctgtaaaatatttcttctggtaggtcctggctataagacatgtccatgctgcagtcataaagttgacatccgttggtttctgcagattctatggcctctttacatgcttcagctgttctcacccatttttcatggctgaattcttggttgatgaatggttctcctttttcgtttctgaaatttgcataatctttgtttccattgaagagaggactagctgcccacagcagtattttggctttaagggctaatgctgcaggttgtgtcaaacgtcccatttctgtagcttccatagtgatgactggtggcaagtctttgtacgagtcgtctatgagctttaccatgtaatcaactatttgatctaccggcatgcgggtaacttttactccttctggatcagtcgatacaggaagagctttgtctacaataggaatagggccatagtgttcaaataggaaaaaatggtaataggcttttagtacgtttacttcagcgatccatctttttcgttcagaatctgtcaagtcgttcactttatgctgatctcttacataatcaagaaagatattacactctctaatggcacggaacatgggaagattactgcctccttctccgtcccaataattggcataaggagcatcaatattctgtaatccacgggctatataaaagctgacttcattgtcaaagtgagagtcattagtagtatagaaccaacattcgtgtccggctcccatgccgggaattcgtttgacagatccatggtctggaacaaaatggtagcagttggccaaatagcgttcggctgtatttctgttgttgaatacaatgtccaatgttgtcacattatcgggaactatatccaaataatctgaacaagaacaaagcaacgtcaaaatgatagtcggaatatatttcgtaatttttttcatatcattgctttttagaagttaatgttaatgccgaggttatatactcgctgaataggatatcctaggccattattacccatttctgcatcccatagtttaaatttgctgaaggttagtaggttacttcctgttaagtataggcgcaaagattgtacacctatttttttcagagctttttgcgagaatgtatagcctaattctacagttttcagacgaataaatgatccgtcatgcatccaccaggtacttgtttgcatattattttcaacaagtgtgggagataaacgtggccaaaatgcgtatatattacgattgtcttcagaccaatgatctttggctataacatccaaacattgttgaacacccgtctttccacctgcatcgtagtttacaaagggagatgtgtttctagggtcgatgaaaaaagatactcttgcatttccttgaaaaaacatagagaggtcgaatcctttgtagccggtagagaaaccaaatccgtaagtaatttcaggttgattaggataaccgagaaaaatttggtcttcactagtaatttttccatcattatttaaatctttatatttaatatctcccggcatggctccaccattgaaacttgtttgtgagggagagttggcaacatcattttcatcaataaataggcgttcggcgatatatccgtaattaaagttgattggttgccctattctagaacgatacccttgtccgtaactagcataatctggttcttcatagacttcataccttcctttggcaagcgtgaaattacccattccttttatccagaaatctttattggcaatataagaatagttgactgataaatcaactcctcgggaagatgcttcacctatattagcacttactccggcagaaagtcccattgtagaaggaatgtaggcgcggttttggtaaatttgagtacgacgttcatagaagaagtcagcttgaacttctaatgcactgttgaacatacctaattcaataccaaagttccctttctttgatttctcccatgtaatattagtgttgggataacgagaaatagatacaccattcatttggttgccgtaatttgttccaaaatattggccacgtccaccatcatttggatttacttccgataaataatagaaacgatcatctgaacttccaatggcatcattacctaccagaccataggtcattttgaatttcagtttatccattgtgtttaataatggctcccaaaagctttcgttcgaaatgatataccctaaaccgaaggaagggaagaaaccgtatcgttcgtgagcagcaaaccgttcagaaccgttatatccaaagttgaattctgcaaaatatctggaatcgtaagcataggtaaagcgacctgctagcccttggtttctgcgtggtagtgatttctgtagagtgtcttcacttgatcttttttcttctcggcgagtatatactaacattccgctagtggcatgcacaccgaatgttcggttatagctgatggcagcttctacatagttggt

SEQ ID NO: 4609 - DNA, 44971 bp, Unknown
  gut microbiota DNA sequence
aacaaccttataaaaagaagcggggcaggatgatcatcctgccccgcttctttttataaggttacttcttttgtggaagtatctctatccagtagtcatccgggtcgttgataaaataaagccccatggctgtattctcaaaacagacacaattcatttctttgtgatattgccgtacggcgttatagtcgccggctacacgaaagcataaatgactttcgttttctcccagttcatagggggaggtatgatctttcagccaggtcagttccagtaggaagccggtttcgttgtccgtcaggtagaccaggatgaaagaaccgtcggaagcttccttccgactatgttcttttaagccaagcgctttttcataaaaagcaatgcttcgctccagattcgttacattgatattaaagtgatcaaatctacttttaatttccatgattgctatcttgttattttttcatcaatagcttcacgatttctccgacatacgtacggggttgtccggcttgcggagtcgtttgtgaaggcagtttcttacattcgataacagccgaaggggtcgtttggttcggagcgtatagtttcagtgtataagtttctgctttttctatcgcttcgtagggctgatcggcagaaagtgtgcaataagctacggctttaccgttttgataacccagtgcgccgcctgcgttggctgtcatattggtcatgttgaattcatctttgccgatagagatcaccagttttccattgcccatcaatgcgtatacatcgcccggaatctgcttcagatcgatttctgtatatcctggcatatctgctgaagccttgccgacaggagttgcaggagttaaagtagcagcaggagtagttgtctgatctgcttctgcagtggtaactttaccgccctgaccaatcaccagcggacctgcagcagcaacgatagacggcttctgtgcttcttcttcttttttctttttctcagacttcggacgagtatcgggagcaccgaaggctacagctacatccataaagatgtcatcggcaaagtctaccgtttttctgcgccatttagccaagccgcgtaccagtttggttttagctttgttcagtgcatattcatctgtaatccattcttctgctttgtatttttctgtttcgcggtaggtgaaacggattttttccagttctaccaagcaactgcccggtttgcaggtaacagtgatctgataattgacccaagtgcggtccaatgacagggcgctggagtaaaatgtgatccattcttcacctacaccggcgatggttccttgtgcttcatcgctgaaaacgacgcggctgtccggattattgttttctttcagacgttcgttcatccacttcatgacagtgtcgtagatctgcttctgactcattccgggaatctggaattccttggaaaatactactttaccatctactacaggaacagctcccgcaaggtatctggtatcatctcttttttctttgtgcgattcggctctcattgccattggcaggcatgtgagaagcatggtaagaaacaggattgttaacttattcataattattattgtgtttatttggttatttcaaaactttcgccccgatgggtgatgctgacaaaccggcatcctgcattttcggcaaaatcacggagggcatttccgccttcgtagtcttcactgaagtgcatgggtacaaatatagtagtttttatttgttcgatgaactgttttgcacctttcatataatcttttcccatcctgcggtccactgggaacagcgctaaatcgatcttcggtgctttttcttttaaatatttaacttctgcaaggaagtctccgttggcttttcgtatctccgcttcggtagattcttcactccagtgccagttgttcagatcgcctgcatggaagatgttccagtcttgcagatggatcaggtacgaactgccgacatcggtcgagccgaatgcttcgatgcggatcgtctcgtcttcgtaggtttctccttttttaatataagtagcgttttcgggctttccacgatggcttttcagaatatctttggagaaaatgtaccggatgtcgggacgtgcttctttccacgtcagtatttcacggttgaagtggtcggggtgaaagtgagtggccaatacatagagtttacccggtctttgcaggaggtagtcatgtacgattccccggttatgttcagtttccgaagaatctttgtaataatcgatgatgacggtcacaccttctgcttcgatggcaaaaccgctatgataaatataatccagtgtcatgagctgattatttttacagttgcaatattacgtattctagttggagttggcaagaaaaatcagtgaaatcagggagaaagtcgattgatttcccattttccatccgtctttagggtatacaggaagcgatcgtgtaaccggttggggcgtccttgccaaaactccatccgggtaggagtgacggcatatccgccccagttgtcagggcgttccacttcttttcccagccatcgggcagcttctttaacgaaagcgcgtatcagttgcatccggcttgcgataggctggctttgtggagagatacgtgcaccgatgcggcttttataagggcgctttcggaaatattcgtccgattcctccggagaaactttcgcggcagtaccttcgatgtgtacttgcctttcaagttcatgccagacaaaggaaagtgaaatgtacggattttgtgccagttgccttcctttgcggctttcgtagttggtatagaagataaactttccgtcatgcagtcctttcagcagtacggtacgggtcgagggtctgccttcgggagatacggtacctacaatgatggcggtcggttcttctacgtttgcgtcgatggcttcctgtagccagcggctgaaaagtgaaagcgggtcgcagggaagttcgctttcccttaacccgcttttggtatattcttgccggatatcagctatattcttcattcattcaagattcatgatttctaattccaaatttctacatcggtacttctatcaataagatatgtgagtccttcaatgtttcgagttcgaaacttttcgtatcatagacgcccattccgtcgcgacgtttcagtacttctccgtctactacgatttctccttcaatcaggaaaatgtatacgccgccatgactttggtgcaagtgataaccgagtttctttccggcttccacctttccgatagaaaaccaggtgtcttgtagaagtgaagcgggagtactgccgtcgggcgatacaatcactgccagttcgttcggtcgttccagctctttgatgctaaaatccttgtagacaggatgcgtattccgttctctcggcataatccatatttgtaggaattctaccggctctacagggctggcattcacttcactgtggaaaatacccgttccggcactcatcgtctgaatctctccgacagtgatgatacggctgtttttcttgctgtcaccatgttgcagatgtcctttcaatggaatggagataatctccatatttttatgcggatgggtttggaacccttctccgggggcgactttgtcgtcattcaatacgcggagggcaccgaagttgatacggtcagaatcgaagtattcgtcgaaactgaaggtatggtaactatccagccagtcatattgggaatgtcctcttgtatctgctttatgtattactttcttcataattttctccttttctaattgtttatatacttctgtaacaagggaagtcaggtaaaggttctatctcttcacttcatttagcaaaggcttgtggttgatgaaatccttgatattctgaagtgtggtcatggcgatatttcccattgcttcacgtgtgaaaaaggcttgatgcgaagtgacaatcacattgttaaatgagagcagacgggcaagcacgtcgtcgtcgatgatgcggtcggactggtcttcgtagaaatattcgctttcttcctcgtacacatccaatccggcagaaccgattttcttgttttttaagccttcgatcagggcattggtgtgaatcaattgtccacgaccggtattgatgatcatgactccgtctttcattttgctgatggagtagtcattgatcagatatttggtggcttcggtaagcgggcaatgcagggaaataatgtcggaactatggtacaattcgtccaaagaagtataaacgatttgttcttccctggcaaagttgtagtcgggataaaggtcataagccagtatattcattccgaatccctttaagatatgaatcagaattttggcgatttttcctgtaccgatgatacctgccgtcttaccgtgcatgtcgaatcccatcagaccgtgaagggaaaagtttccgtcttttgtacgccacgaagcgcgtggaatctttcggttgagagagagcatgagtgctacggtatattcggcaacggcataaggcgaatatgcaggaacccgtacaacggtgattccggcagtggcggcagcgttcaggtctacattattgaatcctgcacatcggagtgccagtagttttactccgttggctgccatagcatgaatgacttctgcatcggccgtatcgttgacaaagatacagaccgcgtctactccttgcgtcaatagcacgttattcttattcagatgtcctttataataacggaattcaaatccgaactctttgtttttatcgttgaaagaagcttcgtcataaggctttgttccgaaaaatgcaattgtataggccataatattttctgtttttattcttattaataaacgtaaaaacagggtggtttgtttatctttacctccgctcagaatgtggattgtttcattagaaacagtttttattttcaattaaaatgagccggtaagcgaaaataagtgcacaaacatgtgttgcgtgtgcaggaatgttgtatctttgcgcccgaattaatttaaaaaagatttagatgagaaaaaatttcttgattggatttgtaatgttaatcgtttcaattccaacttttgccggagattatctaactaatacgaatcagaatgctgctttcttgcgcatgatagcccgcggcgcttccattgatattgatggagtttatagtaatcctgccggactggcattccttccccaaaatggtttacaggtagcactgactattcagagtgcatatcagactcgtgatattgctgctacaagtcctttgtggactatggatggacagacttccgtgcgcaattatgaaggaaaagcttcggctcccgttatcccttctgtccatgctgtatataagaatggtgactgggcattttccggtagtttcgctatcgttggtggtggtgaaaagcttctttcaatacaggtttgcctatgtttgatgcagctgctatcggcttggtaaattctacaagtgatatgttgaaacctaatatgtacaatatcaattcagccatggaaggtcgtcaatatatttatggtttgcagttaggggcaagctataagattaatgaacacttttcagtttttgccggtgcccgtatgaattactttacaggtggatataaaggttttctgaatattgccttgaaagaaggagtagcaggacagatcggtgctgctatagtacaacaaattatgggggctaatcctaatttgagtttagaacaggcacagcagattgcacaagaacaatctgcacctatgcttcagaaactgaatgatacgaagcttgaactggattgtgaccagacaggttggggattgacgccgattatcggtgtagacgctaagttcggtaagttgaatttggctgcgaagtatgagttcaaagctaatatgaatattgagaacaatacacataaattggaatttccggatgctgctgctgcctatatggcaccttatcagcatggtgtgaatactccaagtgacctcccttctatgttatctgtagcagcaagttatgaattcttgccttctcttcgtgcttcagtagagtatcatttctttgatgacaagaatgcaggtatggctgataacaagcagaagacattgaaacatggaacacacgaatacctggctggtgtagaatgggatataaacaaaatattcacagtcagtggtggttatcagaaaactgattatggattgagcgatgctttccagacagacacaagtttctcttgtgattcttattcagtcggtttgggcggtcgtattaatcttagtaaggcgttaagtttagatgttgcttatttctggactacctacagcgattataccaaagaaaatccacgtggcttggatggggctatggcttcaatggataaagatgtttatagtcgtacaaacaaagtgtttggtgtaagtgtaaactataagttctaatattaatccgctacgattttatattaaagaagccgtctcgaacattgttcagaggcggcttctcatattatatatacctaatattatatatgtaatagattagaaagaatattgtaccagcatattcagccgattggcatggcgggtagaagagttgaaatcagtgcgccatcctctcagatattcaacacctacttgcatattgctagtcacattccagaaagcatttgctacgaaatactgtccttttcggtatgcttccggattatcactcggatagttgttttcagagtaaagtctggataagctgtatgtaccggatacaaagatattcgggcaaatattatattgcaaccccgcataccagcccagcatcggaagaacctgcatcttgccttcattatccggatcgggaacgatgtccacattcagattacttaagtcgttcagataagaaccaattccttttccataattaaactgtccgaacacttgccacttcttggttacattaaaggtggtagatgcttgcaggccaaatccggtagtcgaaaaagccttgtcgtgcacattacttgaataagtcatgctgcgtacgattgcacccaacttaatatgactgttactattccagttatactgtgcagaagctgcaaaatccggcattcgttgcgtgttgatagatacatcgctattcgttgtaccgtctaccgaaggcatttccatggcaacgccgaatctccagtttttcagtttatcgcacatataactcagttgagtggtacgatagaaagcggaaccgttcggaccggcgaagtcaattgttgcaggcagagccgaaaggtccatgaatgaaccgtagctgtatccgatggtaaatcctaagaactgcgcatacgcattttgaagttcaaacgtcttcccatctccacggaagtttccggcggtatacaccacgaagtcgcccagatgcttggttcgtcctaccaatttcaggaatagggtagaagtggtgatgtccatctgaaattgattcttggcaaaatttccctttccgggctgtccgatcaatgccggatagaaatccacatcgtcaacgatgccgttgaaatcatactctgccgtcgcacgtacgtagccaccgataccaagggcgaattttcctttctgatccgtcagaaggaagcggggagcattcgggtcgtgaaaacgcatctgagagcggtcgttcatgattcggatgatttcatctccggccttgtccctggagacgaacatgatggaattcggttcctcatcctcgatgactactttcttttgcgcatgagcacagacggggaaaattccgatccccagtagcatagctaccattttaaagcttgttttcattatcagttaagttttaggtgaatgcccaatgaacaactaaaaaaagaaatggttgagaggggctaaggaaaaattgccaaacttatcggaagaattgctatttataatcgttctaaaaaagcggatctttgtatcgtactaattagataaataaaatacgagaatggaaaaagtagattttactcaaggaatattggcgatggagtcagacctgcatcgtttcgcatataagttgacttcagaccgtgattctgccaacgacttagttcaggattgtgtattgcaggcattggataatcatgagaaatttacgcatgccaagaatctgaaaggatggatgtttaccatcatgcgtaatatctttgtcaacaactaccggcgcacggtccgcgaaatgaatttgatcgatgatacctattccatcaatcagcaaagtttgatagaagatgaagaaggcgaccgtttcgagtttgcttatgacatgaagcagctgtatagagtgatccattccatccccgaagatatgaaagttcctttccagatgtttgtagctggatttaaatacagggaaattgccgaaaaattaggattgccgatggggacggtaaagagccgacttttctttatccgtaagcgtctgaaagaagaattgaaagacttctcctgatgcaactttctaattgagtgatgtgttttaaggtcaaagtgaagccttcctgtcaaaatacgacgaatgacaggaaggcttatttaatttgaaatattcttccgaaatacttggtttataaaataaacctatttatatttgcatcgagtaagagagatgcgcagctccttactttttttaatccatataaggtttataaaataaactaattaaatcgtatcaactaattgattggaggaaagtaaaagatgaaacgcttgttattcattgctttagggattatttgttaccacgttgttacttttgcacaagaagtaaaagtagaagtgcggggtattcgtagtgcaaaaggcgctattatggtcatggcacaacaggattcggaatcgaagccggtatatgcgatggctactgctgttaaagatacagtgactgttgttctaaaagatgttccatgggaaaagtttttaatctctcttttccatgatgagaacggaaactgggaattggacatgaatgaacagggaataccggtagaagggtatgcccgggaaaaatgcaagaaagaggcggatgcttcggctaccgttaaaatgaagatgtattatccggtaaatgactaacagtatgcgatacctgatatttctgatattggccggctttaccggagttactgcttgggggcagacttcgacgactgctcggccgatggctgtgaatgatactctgacagaagattccacttatgcgttgcaggaagtggtggtacggacaagtcctgtgaaacggaaggcagaccgttttatcctgtccgtccctcctgcacagaacaaagacggagtcgaactccttcaacaagcgcccggagtatggttgtccgacgagcggatttccatcaatggttcttccggcacgaaggtgtttgtagataatagggagataaaacttaccggagagatgctgataggctatctccgttctttgaaatcggacgatattgcccgcgttgaagtgcttccaatggcgggagccgataaggatgccgatgctcagggaggtgctatacatattataatgagacgtcatacggacaaaggatttcagggaaatctttctatgaatgcttcttttgcctcttccttgcaatcttatcagcctagtggtagcttgaattatcatagtgggaagtgggatacctatggatttgcttccggtactttggttcctcagaataaaggagatttgtacgttacccgtgattatgtagcgggagataaaggtttttccagtctggcccgtatgaagcagccttcgcgttacgggacgattcggatgggaacagtttatacgatggactcttccaatagtctgggagtagagctggagtatgttcgtcgcggatacatctggccgtctcagagttactctactctgtcggtaggaccgctggatatggaaagtcagggtgtgtatcgtcagaaagagacttacaatatgtatacagctactgccaactatatacataaactggataaggacggttcggtgctgaagcttgtcaccgactatatctctaaagatctgcatggcagaaatcagtatcaaatttttcaggagataggtgctctaaataaagataccgtttaccgttcccgctctaatgccacttatcagatcgcaactgccgatctgtcgtggaaacaacagttacataagaaatcgtttttccagataggaatgaaatatacctatacgggaatgaaagatgatgcctgttacgaagggctggaacctgacgaaagttggaagcccaatgttgcttatggatatgaactcgattatcacgagaatatcggtgctttatacggaacttattctctggatatgaaaagaggatctgttcatattggacttcggggagaatatacgcaaacctccaatgaaacagaacgtcggacgagaaaatactgggattggtttccacatatcgacggaaatttctattttgatgaaattcacaagtggatgcttatcggtcagtatggacgctatatagaacgtccgactttttcggctctcaacccgaaccggattcagacttccgaatatagttatctgataggcaacccgatgttgcgtcctacttatattaataaattcagtattacgctggtctataacttccggtatacattgactgttggcggcaatttgcaccatgatctgatccgtcagtttggtaaagaagatgcggagaattcggatatatcatatgtcatcaatgagaatcacaatcgtgagaaccattggttcgtagccatcactgctccctggcagccgctcaattggctgaatctgaatgccagctttatcggagtgaggcaagatatccgcatgtatcgggaggacgattactttgggcacttcctttatttcgccaatgctaatgctacggtccttttaccgtcagactattcgttggaagcacaatataatggagttagccggttgtattccggtaatagcgggatcgatcctcgtcatacattcaacctgcacctgcgcaaaaaatggaaagacgggcgttgtgtagctactttgggggtagacaatatcttcaaccgatataattcttatttcagcaatgtaccgagttattcatctcaaaatcgttttgaactggcttcgagcggaagactgatgaaactcacatttacctggaatttcaatcatggaaagaaatcgggtgcggtgactgtagaaaagaaatcggcaagtgaaagaagccgtatcgaaggaaaatagacaaggatttttggtttattacgtaaacaatattatttttgaaacaaaattgatagaatatggaagacaagagaatttcagagaaagagagtttggaactgattgcccgcatgattcgggagacgcaggacaatacagcccgttatgcagcctacccattattgatatggggatatactactgtggctatatcacttgtggtatggtacttttatttgcagacgggagtgtggcagatcaattttctctggtttgctttgcctgtcattgccggaccgctgactatcttttttaataggaaagacaagaataagggagcaaaaaattacatagaccgggtgactggtcagatatgggctgtgtttggagtagtaggtttttgtctgtcttgcatggcatttgttgtccgtattgatattctgtttgtaatttccttattgatggggatgggggctactcttacggggttggtatgtaagtacaagccgcttagtatagcagggatgactggtatcgccctttctttttccatgctttttattcatggaagcggagtatatctggtgtttgccgctatctttatagtgatgatgattgtccctggacatattatgaataaacagatgaagaagcaatgtttaaagaactgaatcctatcttgcattcacagcttcgcttggctataatgtcgattctgctgacggtggaggaggctgagttcgtctacttgaaagagaagacccagtcgacagcgggaaacctcagtgtgcagttggataagctgagtgaagccggatatatcgaggtggaaaaaagctttgtaggcaaaaggccgcgtactgcctgccggatcactgccggaggcaggaaagcgatggaggaatatgtggagacgctgaaggagtatctttcggggttgtagttcgtacttaaaagaaagaggtttgaaacctttattgggcgcaaagtaagagaatgtaatctaaacttgaactatgccggtaaagtcaatgtataagtacatttctttatcggcatagtttttaattgcattttacgggatgaattaatccatcatttcttttattctgtctttggcttgttgagccttctcctgtgcggtatggctcatttctgtggctttttccttcacagtgttggttgcttccgtagctttttctttggcgacattggcggcatgttgcactttctttttcaagctgtccccagagtgggcacttgcttccgctcctctttctttagcttcttcggctctttcttgagcaagtttggcatccatctttgcctgttctgctgctacatttacgtctttttttgattgataatccatgatcttaagtttttaaattgaacatacctctagaacaatccggcaatttgaaaatacttttgggtgggaggaattttaagtctttttatttatccaggtatttatataaataagagacgtcttcatccatatcatccagaatgttcagttcttgtagtcgtttcattattctgttctgtgttgtagagcccaaatcacgaatttttgtcagtctgttccatccatatttgtaagttaattctaataaatcccggagggtttgtattccttgttcgcatagaactcgtgatgctctaacttcaaatcctaaattttctataggggtattgagcagggcgattgcctctttttcctctttcgtcatttggttttctgtgttcattgtatagaggcagtcttttccgtaatacatttcgtaaagtcgcagtgctgctttgaggtgtatcatttcgtctttataggttttgaggaatccggttcgatttttgatttcacgtataagtctttgatattcgtcttgcatattataggtgttttggcaagactgcttgcaatattctttgaaacttccttccaatgcgataaaaagaaacatccgtcttctgttatcgttctgtatcattccggcaagttcttttattatctgacgcattaccggagtaagttctttcatagactgtagtaagaagatttcctcttcactttcctttattaatctttctttgcgtttttcgagttccttctctgtaagactaagctgtgtgtgtcgttcaatgcatctcagcagactgtcttcatcgagcatcagatagtggtcgatttccgagcaagtaatttcctgttttttacaccacgtgttaatacgtctagaagatacctgatacttttttgcggcttcttcaattccaatccattgttttgttgtcatacctcatttgtttttaagtgtatgcgccgcaaccggattaaataaaaagaggtgcgagtcatacatatatttccatgttgaggcagtcgcaagcctatagaagataaatatagtacgcccgcaccaatgcttatatgttttaaattgaatataagttcggtgcggacatctaataatatcttctagtttgaaaacgcgacttctcaacacgaattaattaaatgtccttaaacatgagggttggctgtcaatggtccaatcctcgttgcaaatataattctttttctggaaacggggatgtcagaaatgtcttttttcttaggcagtagttcaaaataggtattatttaatgggaacttgacgatagggttgactatgatgtctcaactaagtacaaactattatccgatgcattatggctagttgcaagttttttattatctttgcaccccgaaaacaagtaaaaagatgtatgatgccgtgaatagcggtcgtgtattctagaacaccacgtaaaaaacaggagttatgaaagaaaaagtatcagtaccttttatgttgctgggcattctcttcaatgtatgcctcattgcagccaatcttcttgaaacgaaagtaattcaggtcggcagcctgactgtcacagccggattattggtttttcccatttcttatatcattaatgattgtatcgccgaagtttggggattcaagaaagcacgtcttattatctggagtggttttgccatgaacttctttgtggtagggcttggcttgatagctgttgcgatacctgctgctccgttctgggaaggcgaagagcatttcgattttgtattcggtatggctccccgcatcgtagcagccagtttgatggctttccttgtcggttcattccttaatgcgtatgtgatgagtaagatgaagatcgccagtcagggtcggaacttctccgcccgtgccattctctcaacgattgtcggtgagactgccgactcattgattttcttccccgtagctttcggaggcatcattgcctggaaagaactgcttatcatgatgggacttcagattgtcctgaaatctatgtacgaagttatcatccttccggtgactatccgcgtagtgaaagtgattaagaaggtagacggcagcgacgtgtacgatactaatatttcttataacgtactgaaagtcaaagatatttaatgaaacgactttttccggcctgcttcgagggctgagaatataaagagaattttatgatgaacagagagactgcattggttgtgttcagtggcggacaggattctaccacttgcctcttttgggcgaaacgcaactttaaaaaagtatacgctttgagtttcctttatggtcagaagcaccagaaagaagtggaactcgccagagaaatagcccgaaaggcagaagtggaatttgatgtgatggatgtgtctttcataggaacattgggacataattcgttgactgacaccacgatggtaatggatcaggaaaagcccgcaggcagcgtccccaatacttttgttccgggacgtaatctgtttttcctgagtattgccgcagtatatgcccgcgaacgtggcattaaccatttggtgacaggagtttctcagactgactttagcggctatcccgattgccgggacgcgtttattaagtctttgaatgtgacattaaacctggcaatggatgagcaattcgtgattcatacccctctgatgtggattgataaagcagaaacttgggctttggcagatgaattgggagtactggatttgatccgtaatgagactttgacatgctataatggcattcagggggatggctgcgggcattgtcccgcctgtacgttacgtcgtgaggggctggaaaagtatttaaaaaagaagaatcaataatatctctacacagagactaaaaacgtgttttttattgtcacttgtcacttttgaagattaactccttgattacgaatggataaagggtgataatagatggtgataatagggtgataataaccgatgaatgcttttttattgtcacctttatctttgctgatagatacttgctattctatcattggcattcgtttcatttcgggatgtgcaaggataaagagtcattgtcggttgtttcaagaagtttcaaccgcttgaaactttggttccatacgcttgaaactctagtttccattacttgaaaccatagtttcatacgctcgaaacttttagtttcaaggctttgaaactagagtttcatcatggtgaaacacttcattcctttataggaaacgactaaaagcaacggtcgttttgataaataggagtaccggatgataataggaataccggatggtgaaagatgaaagatcggtgatagattgcaatcatcaatctttcaccactgaaccatcgatggataagccgtttcagtgaatatggtgacaggtgaaagatgttttgcgttttttctatatgaagagagtttaaaactatattaaacaatggctgaattaaaagaccaactttccttattaggaagaaaaacggagtataaacaagactatgctcctgaagtattggaggctttcgataataagcatccggaaaatgattactgggtacgtttcaactgtcccgaatttacaagcctatgccccataaccggacaacctgactttgcagaaatacgtatcagctacatccccgacattaagatggtggaaagcaagagtttgaaactttatctgtttagcttccgcagtcatggcgcatttcatgaagactgtgtaaacatcatcatgaaagatctgataaaactgatgaatcccaaatatatcgaggttacgggtatctttactccacgtggcggtatttcgatttatccgtatgccaattatggccgtccgggaacgaagttcgaacagatggcagagcaccggttgatgaatcgggaataaccagatataaaaataataatacgggcagaatatgactcataatatacctactgaattgcagagatacgtgcaggaaaggattatcccgcaatatgccggctttgataaggcgcaccagatagaccatgcagaaaaagtgatcgaagaaagtctgaagctggctcttcattatgaagtcgattctgcaatggtttatacggttgccgcttatcacgacttgggtttatgcgagggacgtgaatttcatcatatcgtttcggggagaatactgttggcagatgaaattttgcaccgttggtttaccgatgaacaaatgctggagatgaaagaagcgatagaagatcatcgtgcctccaataaacaggctccgcgaagtatctacgggaaaatagtggctgaggcagaccggattattgatccggaaataacactgcgccgcaccgtacagtatggtttgtctcattatccggagatggataaagagcagcagtatgaacgcttccggaaacatcttgccgataaatatgcagaaggagggtatctgaagttatggataccccagtctgataatgccggacggttggcggaactccgacacttgattgcaaatgaggaaaaactgagagaagtattcaacaaattgtatctgcaggagaaagattgacttctttaaatttaaaatgtaggcttacatttaatttcctttttaattcctatctttgcattaaagaaggtatatgatggagcaggacaagtatataactcagttttctacttatcttttctgggatgtgaaaagagaagatttagatatggaaaaacattctcgatatataataaagagagtgcttgagtatggtatgctcctcgactggaagatggttctacaatattatggtcttgatagaattgtagagttggctaagacttttcgtgatttagagcctcgggctctagcttatctttgtgctatatctcgcactcctaaagaacaattcagatgttacacttatcaacagtcgaacccgcaacactggaacttttaagaaagttacagagtctacctatactaaataatacacgtttggtaggtggaacagccttagctttgcaattcgggcatcgaaaatcagtggatttagatttttttggtcacatagatgtggattctttagatttgcaagaagctttgcaaaccattggagcattgacgacattgaaagattctaagaatattcatatctattcattggatggtattaaaatagatattgtaaattacgcatatccttggttggatgatgtcgttattaagaatggtatacgtttggcgagtaccaaagatattgcagcaatgaagattactgctattattggaagaggtaccatgaaggattttgttgatatttactatcttttgaagagaaagtattcgataacagatatcttgaatttttatactcagaagtatccggatggttcctgttttatggctatgaaaagtttggcatattttggtgatgctgatttcgatgtgatgccttatatgttttctgatataacttgggatgaaattaaagaatttataataaatagtttaacacaatgttaacgctatttattcatgatgatacggccctccattcaatatcgtcattgcccgataaatctgttccacgaagatcagccgtatcatctgatgtgaaaacgtcatcttcgacattgaaatcttttcattagctacctgatacaccttctccgaaaatccgtaaggaccaccgatgacaaataccaaccgcttattcaccgtattcatcttccgtttcatataatcggcaaattcgagtgaacgcatttctttcccgtgctcatcgagcagcacgatcacatcccccggttgcaacgctttcaatatcagttccccttctttctccttctgctgatccatcgaaaggctcttggtattcttcagttcggggatcacttccatatcaaaagtgatgaagcgtttggtacgctgaatatagtcattaatagctgtaatatagtgttgttctacggttcgtccaacgacgagcaaagttgttttcatgcgtctgatattctgattcgagcacaaaaataggcattttttatgttattctgcaattaatgcttacctttgcctatcattagttgaaagtttaagcctttaaacttcaacccaaaagcttggatttatgaagaaacgagtgcttttaggaatggcctctttgcttctttctgtctcattgctgatggcgcaggagataccggcaggagtgattacggcatttaagcggggaagctcgcaggaactgagtaagtatatgggagacaaggtaaacctcgttctccaaggcagctcggcaaacgttgacaagaagaaagcgacagcaatgatgcaagagtttttcacggaaaacaaggtcaacgcatttgacgtgaatcatcagggaaaacgggatgaatccagttttgtcataggtacgctgacgactacaaaagggaaattccgtgtgaactgcttcctgaaaaaagtgcagactcaatatttaatacaccaaataagaattgacaagatcaatgaataaggaaaaagaactgatcgacaaactgatcgatcttgcttttgcagaagatataggtgatggtgaccataccaccctttcgtgtattcccgctactgcaatgggaaaatcaaaactactgatcaaagaagccggtgtactggccggaatcgaagttgccaaagaaatcttcaaccgtttcgacccgtccatgaaagtggaagtgtttatcaatgacggcactgaagtgaaaccgggcgacgtagctatgatcgtagaaggaaaagtacaatccttgctccagaccgaacgcctgatgctgaacgtcatgcagcgtatgagcggtatcgcaaccatgacccgcaagtatgccagacaactggaaggcactcacacccgcgtgctggatacccgcaagacaactccggggatgcgtatcctcgaaaagatggcagtcaaaatcggtggcggtgtaaaccatcgtatcggtctgttcgacatgattctgctgaaagacaatcacgtggattttgccggaggcatcgacaaagcgatcaaccgtgccaaggattactgcaaggaaaagggcaaggacctgaagattgaaatcgaagtacgcaacttcgacgaattgcagcaagtgcttgacttgggtggcgtagaccgcatcatgttcgacaactttacgcccgaaatgactaagaaggcagtcgatatggtagccggcaaatacgaaacagaatcttccggcggtatcactttcgatacccttcgcgactatgccgaatgtggcgtagactttatctctgtaggagctttgactcattcggtgaaaggacttgacatgagtttcaaagcatgctgaatctataagtgatgaactgataataaataaacggtgaacagtgctgttgctatcgtgctgcagctgttcaccgtttattatttacgaatcatcatttctttaacttcttttagcaaaactctttgcagcattcctcaaatacttgcgtctaaaggataaaaacggcgcagacatacgttcgatttaaaaaagacaattggcattggaaaacgagatagaactgataaagggctgtcgggcaggacaggattcagcccgaaaggaactttacaccctctatgccaaacaaatgttggcggtatgctaccgctatacgggcgatatggatgcggcgcacgatgtactgcatgacggtttcatcaagatttttaccaacttctcattccggggtgaatcctcgctttgtacgtggatcacacgggtgatggtgacacagtcactggactatctgagacgggagaaacgagtcaatcagttggtagtgcatgaagagcagcttcccgacataccggatatttcgtcgtcgggaggaggagcagggatctccgaagaacaattaatggcgtttgtcgccgaattgccggatggttgccgaaccgttttcaacctttatgtgtttgaagagaaatcgcacaaggagatagccgggatgcttcacattaaagaacattcgtctacttcgcagttacacagagccaagtatttgttagcaaaaagaataaaagaatatagaaatcatgaagaaagaaaatgatgaaataaccgatctgtttcgcactcgtctcgctgatgccgggatgactgttcgggatggcttttgggaagagctttcgcaggatatccctgtggcttgccagcatcgccgtcggttgatattcttccgtgtggcagcggcagcatctgtgttgctggtattggctgcatcctcagctactttctggtatctctctccgaaagaagagatggaggaggcgtttaccaaaatcgtggtggcgaacagcggaagaatggatggagatggtgtacgcgctaatcagttgccgacggcaatggaacctgtattgccgaaaccggcacctaaatcattcggattattatcgcagtatccggaagagggagactcggtttccatttccttctccatgtctttctctttctcggcaactaccaccacgggaaatggcaaccgatacggcaaccaaggtcgcaacggttattggcaggcgaataatggtaacacagaaccatccgccgcacaagaagaaaaatatactaccggtacacctgctccggtggaaaacgtaaaaaaacatcgctgggctttgaaagcgcagatggggacggcacttccggcagaggacggtgcctacaagatgccgatctccgcaggagtcactgtagagcggaaactgaatgactatctcggaatagagaccggactgctttattcgaatctgcgctcggaaggacagcacctgcattatctgggcatcccgctgaaagcgaatattaccttgatggatacaaagaaaatcgacctctacgctacggtaggcggagtggcggacaaatgtatagccggtgcgccggacaacagttttaaagaagaacctatccaactggcagttactgccggtatcggaatcacttacaaaattaatgaccgattggcggtttttgccgagccgggtgtttcccatcatttcaagacggattcgaaactggctacggtacgcacgaaacggccgactaattttaatttactttgcggacttcgcatgacgtattaatccttatgaaaatgaaaaaaacacttatgatgctgtggatggctgttagcctgatggtatccctggtgggatgcagcagcgaagaaatggactatgagaatcccgatgtaaccgtttttgtgaaacagctgaaagcgggtacctataatatgaagaatgaaaaaggggtcgtggaagttcctcatttcactgaagaggacattcccgaactattgaaatatgcggaagatctgactattattccttctttcccgtcagtctacaatacgaataacggtaaaatccgtttaggtgaatgtatgctttgggtgatagaatcgatccgtcagggaacagccccgtcgttaggttgcaggatggtactggcgaatgccgaaaattacgaagccatctatttcctgaccgacgacgaagtgctcgacgcggcagcctgctatcgtcgatggtgggaagggcggaaatatccgaagacgacctggacgattgatccgtgctacgacgagccgctttgtggctcaggataccgatggtggtaaaaaaagaaaaatccttcggggcataaaaactaaaaaacatgaggcaacgtttatttgtatcagcagtctttgtactgctgacaggggcgtgctatgcccaatggacgaaggaagattctctgcgattgaagaaatcactgaaggagggcgaagagctgaagctgaataaggaagccgtcagacagattgatttgaatgcaggagcagccaatccgcgtgtgtatgaggagaaacgatggatgcgttttgatgagtcgcttccgcgtgtgatttctccttctgctgtggtcgaatcggatactttgtacgataaacggaggataacaggtgggaaacttcctcttcaaatgcttgaagtgtacaagcctgtttatgctcacttgccattggatacattgaaaattgcgatggagtttaagctccctccccccgaaggaatatctttagggaatggagtaagagtgaacggaggtacgtttagcggtttggatttactgcaggtctttacgagagagttctggcagttcaggaagaaacgaatgcgcacacgtacgatgggggtacttgaggaatatagaaaacagaggtagaaagatgagtgaattgataaaacgtttgataacagctatgacactgtgcctgacagctttgctggtacatgcgcaggaatggacgaaggaggattccttgcgtctgagaaagttgctggacagtgatcaggagctgaatttgaatcaggatgcagtcaggcagattgatttcggcagcgctgtcggtactccccgcatgtcggtggaaaagaagtggatgctgcccgatgagtcgcttcccgaagcattgcctaaaccgaaagtggtattgagtctgatgccctataaggcaaatactccttgtaattgggaccccgtttttcagaagaaaataagaatggataagaatacctggcgtggagatccgcattacgaaatgcgtcatcaaaggtcgtacagcaactgggcacgtaatccgatggcgggaggagtccgtaaatcattggaggagatacgggcgagtggggtacgtttccgtcagttgagtgaacgggcgaatggaatgatggttaattcggtagtgatggatagcccgattcctttgtttggaggcagcggcgtgtacatcaatggaggaactatcggagggcttgatctgatggcggttttcaccaaaaacttctgggataaaaaaggaaaagaacgtcgggagcgtacgttggaagtgttgagaacctatggggattcgacgactgtactgatcaatcgccccattgaacagattgcccgctgaaactgttttattaaatatggacatgtctcatgttccatgttattagattagcacattgaaaaacgattaatttatgaacagaattacttctcttttcggtattcagtatcctattattcaaggtggcatggtgtggtgtagcggatggcgtctggcttccgcagtaagtaatgcgggaggattgggactgcttggcgcaggctctatgcatccggagactcttcgtgaacatatccggaaatgccgtgcggctacagaccgtccctttggagtcaatattcccttgatgtatcctcagattgaagaaatcatggcgattgttgccgaagagggcgtcaagatcgttttcacttctgccggaaatcctaaagcatggaccggatggctacacgaacgtggtattatcgtggctcatgtcgtttcctcttcccgtttcgcgatgaagtgtgaagaggcgggagtagatgcggtagtcgccgagggtttcgaagccggcggacataacgggcgtgaagaaactaccactttctgcttgattcctgcggtacgcaatgcgaccactttgcctttgatcgctgcaggaggtatcggtacgggagaaggtatctttgctgccatggtgctgggagcagaaggggtacaaatcggaactcgttttgcgttgacggatgaaagttcagcaagtccggtcttcaaagaatattgtctgggtttgggagaaggagatactaaattattattgaagaaactggctccgacacgtttggtacggaataatttccgggatgctgtggagagggctgaggatggcggtgcttctgccgaagaattgcggactcttcttgggagaggtcgtgcgaagaaaggtatctttgaaggggatctggaagaaggcgaactggagatagggcaggtgtcggctattgtttcccgtcagcagtcagtagcggaagtcatgaatgaattggtggaggctatgcagcgggcagcggagaagaaatattggtaaaaaaacaagttccgaagtagtgggtttggaaaacctgactacttcagaactttactacttcagaaagttggctgcttaatcaatttataggtttatattttcatattttagatcgaatacatccgctacagctttatataccacttttccttccactacattcaaaccgagtgctagtgccgggtcgtctttacaagcttttttccatcctttatttgctaaagcaatgacataagggagagtagcattggtcaaagccagcgtagaagtataaggtacagctcccgggatattggctacggcataatgaacgataccgtctatcacataggtaggcgcactgtgggtcgtgggatgtgacgtttcgaaacatcctccctgatctattgctacatccacaagtaccgtaccgggctgcatcattgcaagcatatttcgggtaatcagatgaggcgctttatcccccggaatcagcacggaaccgatgaccagatcaacatccggcaattccttttttatccttaattcggatgcgtacagcgtcttgacatttttcggtaatgtctcgctgagatagcgcaggcgtgacagattaatatctgcaactgtaacatccgcacccattcccgcagccatctgcgctgcattacttccgacaataccgcctccgagaattaatactttggcaggcttcacaccggggactcctcccagaaggataccttttcctccttgcggcttttccaaaaagcgtgctccttcctgaatggacatgcgtccggctacctcactcatagggataagcaggggtaaagaatggtcttccttttctacggtttcgtatgccagacagatcgacttattgtcaatcatggcaagagtcagttccttatcggaagcaaaatggaagtaagtgaacaataactgtccttttctgatcagatggtattcgggcgcgataggctctttaacctttacaatcatatctgctgtggcatagacatcctctattgtcggaagcacctgtgcaccgacagacagatatgcttcatccggaaaaccactattgatacctgccgtatgctggatatatacttggtgaccttgcttcacaacttcggcaactccggaaggtgtcatgcctacccgattctcgttgttcttgatttctttgggtactccgatgatcatattgttatatattaaaggtttaacatggaccaatgtacgaaaaatccccttacgttgttattcgcaaggggatgtttaagagcagaatatcgtctgtagtatgatatctgtaaaaggtgatttatattgaatccaatttggaatgaatagaggatttaattcgtcaaatctggatttgcattggtagcactttgtggaatacgtaatgtgtaacgaggatcatcttgttcgataattacggtttggccactattcactactttttcgattcttggtctggtagtacggcgtaagtcaaaccatcgatgaccttcaaacgctaactcacgtgcgcgttcatttaatatttcagtgactaattcagcttgattcatcttgttaatttcgctttctttctgtgaatatttagctggagtatatcttttctccattagttgtaatagacggttgcgagaagcaggtaagttgtttagacaggctgctgcttcagctgcattcagatataactcaccgattcggaaactgcacttgtaataagttgtattatttgtttttttgatagggtaattaccactttggctcatagcaccgaagtagtagtctttacgcaaatcaccgtcttggaacatttgtgcaaatttagatgtagcccgtgaagcttccattgtggcgttactataaacattctcatacgctgtaatggactctacggattcatagtgattgggaagttggaaactgacattgttattataatcttccagtgttttcttttgtgccaatacgcgttcggcagcgtcatatgcagtttgccatttacccatgtagagatgtacacgtgagtcgaatgcatctaccgcaagagtggtgaaacgataattgtaaccagcttcccattcttttcggttaataagctttcgggcattttcaatatcggaaagaatagaagtataaacctcatctattgtattacgagttggcatttcttccagattaagtgtcagcttcagcggtatggcttttgttgcaggagctccgtctttggtatatggctgcccgtataaattggccaataagaaatgcatataccccctcatgaagtaagcttctccaactagttggtcaatatcttcctgactaccctctgtgatttcatcttttttgtttatgatagcattggcgtaatagatgttttcataatatgttgcccatccaaattcatagccaccaacagaattatcatcaatccatttctcgatttttccgaagtcagtttggctttgagaggcgtcttcgactataatgtcttctgtacgcatatcacagacacttctgtctgtcagggaattggcatatacttctgtcatgagtgctctatattcttccaaagtatttgggatcactttgcctgtaggctgtatttccaggaaattactgcatgaagtcataaagaaccccattgcgagcatgagaacgatatatatttttttattcttgttcatattcactgttctttaaaagttgaggttaaggttaaatgttaccgatttagcaactggagtggagtaaaggttgcccattgattccggatccagataattcttgtagctggaaccaaaaacaaataagttacgtccttccagacctattgtcgctcctttgacgttgaatttatgtagccattcttgtggcagagtgtatgcaagtcgtatgttttgaaggcgtacataactgaggcgtttcacccataaatcaagatttttatagattgtccgctcattttcaaaaagatagtaatctgctgaataataattccggttgacgagagccggaagctttgaactgcgattttcagtagtccatcggtttagtatgtctcggttcgtattatgtcccggatcatattcggtaacgctatatgatggggcagtgcgcacatgtgctccaagattataagcaaagttaaaactcagttcccagttgtgataattcagcgtgttgatgaaaccgccggtataaggtgcgtctgttgtgccggcatactcatacagatttcgttggatgtcggcttttccattatattggtataaacctaatccgcccgattcgtcgtacatttcaaagtattcttcgacagaaacagcttcattgcttcctttcggatagataagtatacgccctgtctctggatctaccttacttcggatggcgaagatagtacctgccggatttccttctagtcctggtgtcagactttgtgtactggccaaatcctttaagaccttattgtagttgtaagcgaagttaaatgtagtataccaggaaaagttgcgagtggtaatattacgtgtttgcagattgacttcaattcctttattttccatactagcccaattgatagtcattccgttgaagccattttctaacggcaggtttttgacaccgataagatctgtacctttacgatagtaatagtctacgctaagattaatcgcagacttaagcacggaaaaatcaacaccaatgttgtatgatgctgtcttttcccagcgtaacttatcgttgggagcactcgaaatggagatactgttttcagtgttattagggagaatggtttgagttccataggtgcctataagatacggagaagtgttcttgtcaatgttaccttgcaatccataggaaaggcgtaatgacaaattatccatccaccctgtagctggtttgaagaaaggttcattggatatacgatataatccactaactgaataaataggtaaaaaacggtatttcttatctactccgaacaggtcggatccatccatacgtacacttgctcccaatgtatagcgattcatgagggtgtaagaaccatttgcgtaaaatgaagcaaaggcattctctgtataagtttttatatgtaatggatattttttagcatcctgatcatcacgaatgacgactggttttgttgtaagtgttttaggatcgtagccgtaagcatttgaagttagtgagttataccagttttttcgtatttcagaaccacccataatttgcacttcatgtatatctgcgaaactttgactccattctccttgcagtttccacgtaatctgtgatgttgtggagcctgtaactttgtgcatgccaccttcgggaatgcgatattttgttccattgtcgtatctgctttcatatcgtagatcacgcatggtgaatgtattggctccgatgtattgttccagatccaactgttcccactgtaatccgacctgtgaggttactttccattgatcattgaagcgtaggtcagtgttaaagattgcattgattgctgttgttatagtttctttatttgtattggctctttcttcaaaaatattgaagcctcgtagcgggtcaggaatatctttatttgaaatatcataatcatacgcatagttaccatttgagtcataaggattaaagtatggatttgctgtgcgtgaatagtagataggatttgcatagccatatttatctgcaacgaagtctgtattctttcgtctgtttgcaaaaagtgacatgcctattttcagcatacggtttatttgatacgacgttttgcttgttaaattaaagcgtttcatgctgactcccggtacattaccgtcttcttttgagtagcctagtgaattataataggtaacattttcgcttccgcctgagatgctaaagttgtattcttgtgtaaatgcatctctgaataatatatcattccaatctgtatttatattttttagttgattgatagcggattgagcttcaggtgttaatccatcccagccatttgccctgtatgcatccatcagattatattttttcaggatagatgcaactcctcctttctcataataaacaggatatttatcttcgaagagttcgtatgtatctttaatcagctccaattccaaatcgattttctcctgtgagttaaggagatttaatcgtgaagtatccaaattcggagtataagtcagccttgtattgaaatttacaaccggttttcctgttcttcctcttttggttgtgacaacaattacaccatttgctgctcgtgcaccatagatagcagtggctgctgcatctttcagtatagtaatactttcgatgtcatttggacttattccggcaatagatgattgttttatattaacgatgtcattacttgtatcatcatccaatttgggaatatcagtcccctctaaaggaatgccgtccaatacccacaacggatcctgtgttccgtttagtgaagctgtaccacgaatacgtatacgtgccggtgccccgggagcacctgaagttgtggttacggctacaccggcaatttgtccggccaatgcctggtcgatactttttgctgaacctaccatcgcgtctgttacatcaatttttgtaatagcagctgtcagttttcggcgttctacttcctgataaccggtgacgataacatctcccagtgtatgtgcggaaggttgaagtatgatgcgatagtcattctttcctgcttgcaataataagatttgttcctcaaatccgatatagctgcaatgaatacgggttgttttttcgggaatggaaagagaaaatttaccgtcaatatcagtaactgttcctaaggaaacctctgatgatccgttctttttcagttcatccgtatgaacgtagaccgaagcaccaatcaacggttcgttatcttcaccggagattactaccccggtgatagtacgattagccgcactggccattgccagtgcgttaacaaggaagcatataataatgcaaagatgttttttattcattaattgtaaataaacgtaagtgattgaatcgaattatttaatacctaaagctgtattgatacgtaaaatcatatcttcgtaatgataacgtgttgctgtatcagacgttccgaggcggctctgcaataatttcttaatccgcagtaactctccgcgtttcacggatattgcatccgagatacgattcagttggctgccgtagaagttgagaactcggtgagctcccattttatcttcctgtcggagcgaacgttgttcggccgcatagcagctgcagaaaggagtggcatgatcgagcaagaaatgatcgtctgcaatctttttattgattttcacagcttcgggctctgcggcagctgtgagtaatgcatccagaaagtttttttgcaaagagcgttccagcacattgggaatacctcctcgttcggtaatgccgaaaatattcttgtggagtccgtccattagttccactacggtaaacgctttttttccattgactgattcattttcaatcatacgcatcagacgggtgttgccaagcaagtcccaaaggatgtaggcttgtgcattcttcagtatctgcgtcggggcgttttcttgttgtccaaccggggtgttacggagcaaataggtatattttcctacttccgtatcgaacaaccatttaggataagtcagtacttcatctgtcagaaacttcaaggaagcctgttgcttctctttctcaacgaatgtgtaggtctgtacaccatctcctatgactgtattttcgatatagatgccaccaatgttggccagtacgtgatacagatagttgttccattgattgataattgcgtaatagaggcgtgaggcttcttcgtaagtctgccctttttctccggtagtagtccattgaaggatttgcggaacgatgcgtttcaggttgtcaatgccaagtaaggaagaacgtacgggatcatcgcctaaatcttcattctgtgcacgtggatcaacggcatcacgtacatcctgtgcttcactatatttataaagacggtcggtatgcttgctcaggaaatcaaataagatatctttttcttcttccgggctattctttccgtaccagcgatatccatattcgatggcaaagatatcgtaaggaccgatatgcggggaaagaaccttcacgccatctcccggttgggctatgtagttgaagcgggcatagtccataatagaagaagcggtggaatttaatcgggaagtgaacgttgcggaacgtaaggaatcagttgggaacgctgccgatcccatcatgttgtgacgcaatcccaaagagtgccctacctcgtggcaggcaacaaagcggatagcatcacccaatagtgaatccggcaactgcacgctgcgtgcttccgggcaaacagttccggtctgtactgtaatccattcgcttaccatagagagcacattgtgccaccacatgatgtctgcttccagaatctctccggaacgggggtctaacaaagaaggtcccatcgcattcttcttttccgaagctgcgtaggtcagtacggaatagttcacgtcatccatatctatttccatactatcggtaacttcaatggcgatgattgcattcttgaatccggctttttcaaaagcgatctgccagtcttcaatacctctttttatatatttgcgccattgataaggtgtggaattgtcgatatagaatacgattggtttggcgggttctaccacctttcctttcaggtaagcttcccggtcttccggtttgggttccatacgccaacgggtgataaactgcttcttatccgttctttgctgtgcatcgctgaaactcaatagcggattggtgaaataacctattttctgattatcaaaacgtcccatcatcggagtttcaggcagcagaaggatagaagaactgacttctaccgttacatatacgcttgttgttccttccgtcactttagtagtcagctcggaagtggcaactacattgttcggaaaggatttcacggataagatacgtgatagatttttaatagccgatgttcccagattgatattggtaaatacattattaatgctggtttccgtaccatcatagatgtcgttgatcttgatcaccaatgctgtagagtcctgattgacagcctctatcttgaatgcggcaataagcggtgatataaaattgtccttaaccgaacggaaaatagcatccgtctgaggagccagaggtaacgggcgttgttggcggaacatcagtttcccggttgctttgtcccattccatgcaaatcatttgattttcataatttacaccccggtttactccagcatcgttcaattcagccggtactcgttgtaacttgttgacaacaagtaaatcgcgccctagcaatgatgtgggaacctcaaaataataatcgttctttttttgataaacggcaaacatcccttttttaacactgctgccttccactaatttctcgtagtcgctttttactctctcttcttctgaattttttttctttttctttttgaaccaactcagattttctgtagcaggggtagttgcaagtgctgagtacgcttctccactcagcaatatacatgcaatgaccgctgccattacctttacatacattctcattaagtccttttacttttaattattattaaaaacagccgcaaaagtaataatattaataatataatgattacagtttagttgcgaatataataataaaaggaattattaactaggttcatctgctatcattcttcccggatatttcgtaatctagttggaataatgtacatttgcaggagtaaaaaagtgaagaagataatgaaaagatatattgctgctttattattggcctgttgcgtggaggggtatgcacaggaaaaaaagcaggctgcctttgtgccacctttcgactttccccttacattgagtggaaacttcggagaaattcgttccaatcactttcatggcggattagattttaagacgggaggaacaatcggcaaaccggttcgggcacttgctgacgggtatatctcacgtatacgtgtcaccaatggttcggggtatgtgcttgacgtctgctatcacaacggctattccactatcaaccgccatttgagcgcttttctgtctcccattgccgaaagggtaaagaaacttcaatatgaaaatgagaactgggaagtagaaatcatccccgaacccgatgaatatccggtgaaagccggacagcggattgcgttgagcgggaataccggatactcattcggaccacatcttcatttggatgtattcgagacggagacgggagactatatcgaccctatgcctttctttaaaaagaatctgaaagatacacgtgccccgaaagcggatggtatcatgctttttccgcagcttggcaaaggagtggtcagtggaagtcaggaaaataaaacgattctgccgaacagtgaacatccggtggaagcatggggggtaatcggcacaggtatcaaagcgtatgactacatggacggggtaaataatcattatggagtgtattccgtagtgcttacggtagatggtgccgaagtgttccgtagtaccgtagaccgcttttcgcaggaagaaaaccgaatgataaactcctggacgtatgggcagtacatgaaatcctttattgatcccggaaatacattacggttgttgaaagcctcgaatgataaccgtggcttggtaacgattgacgaagaacgggattatcagtttcaatatacactgaaagatgcttttggcaatacttcccgctatcactttacggtacgtggcaagaaacagccggttgaaccgttgaatcatcgggagaaatatttctttgcctgggataagacgaattatctgcaggaaccgggcttgagtctgattgttccgaaagggatgctatatgataatgtacctcttcaatatcaggtaaaagcggatagcggagcggttgcatttacctatcagttgaatgataagccggtcccgctacatgcaagctgtgaactgcgaatcggattgcggcgcaaaccggtggcggacactacgaaatattacgtggcgcgagtgacccctaaagggactaaatacagcgtaggagggaagtacgaagatggatttatgaaagcatctattcgtgaactgggcacatatacggttgctttggacactgttcctccggaaattatacctgttaacaagaacctgtgggcacgaaacggaaagattgtctatcggctgaaagatgaaggagcaggcatcgcttcttatcggggaacgattgacggtgaatatgcacttttcggtcgtcccaatattgtaaagtcttactgggaatgtgtgcttgacccgaaacatgtgaagaaaggcggcaagcataccgtagaaatgactgtcacggatgcttgtggaaatcagaccgtttcgaaggaaacttttgtttggtaaactattaaaatgtattatatatgaagaaaagaatcattctatctgctgtcctgtctttggcggctctggcgaattctttcgcttgtacgaatctgattgtcggcaaaaatgcctcgactgacggttcgactattgtttcctattcagccgattcgtatggtctgttcggtgagctttatcattatccggctgctacatatcccaaagggactatgttgaaagtctatgaatgggatacgggtaagtatctgggcgaaatcgaacaggcacgccagacttataatgtgactggcaatatgaatgaatttcaagtgactatcggtgaaaccaccttcggtggacgtccggaactggcagattctaccggaatcatcgactacggaagtctgatttatatcggattgcaacgttcacgttctgcccgcgaagcgatccgtatcatgactgacttggtacagcaatatggctattatagtggaggtgaatcgtttacgattgccgatccgaatgaaatctggattatggaaatgatcggtaagggaccgggggtacgtggtgctgtctgggtggctgtacgtgtaccggatgattgtatctcggctcatgccaatcaatcccgtatccatcagtttgacatgaacgacaaagaaaactgtatcacttctccggatgtgatttccttcgctcgcgagaaaggttacttcaatggtgtgaacaaggatttcagctttgctgaggcttatgcgccacttgatttcggtgcccgtcgtttctgcgaagcccgtgtgtggagctatttcaataaatttactgatcatgggaatgactatcttccttatatagaaggaaagacagatactccgatgcctcttttcgtaaagccgaaccgtaaactttccgtacaggatgtgaaagatatgatgcgtgaccactacgaaggaacaccgcttgatatttctaatgatttcggtgccggtccttataaaactccgtatcgcctttctccactgaatttcaaggtaggtgataaggagtattttaacgaacgtccgatttcgactcaacaaagtggcttcgtatttgttgcacaaatgcgtgccaacaagccggaccccataggcggcgttctttggtttggagtggatgatgcgaatatggccgtatttactcctgtttattgctgtacgacgaaagccccgttgtgctatacacgtgtagatggcgcagactacatcacgttctcctggaattccgctttctggattttcaactgggtgtctaatatggtctatccgcgttatgatctgatgatcggtgacgtgcgtgcaactcagaaagagatggaaacgacttttaataatgcgcaggaaggtattgaagaaatggcagctaaattgctggcaaaagataagaatgccgcaatcgctttcctgactaactataccaatatgaccgctcagagtacttttgatacttggaagcaactgggcactttcctgattgtgaagtacaacgacggagtagtgaagcgcgtgaaggacggacagtttgaaaggaattctatcggacagcctgccggtgtcattcgtccgggatatccgaaagagtttctggaggaatatgtgaagcagacaggagagagatatttggtgaaatagttgtcaattattcattaaataactaggatttataaacttattcttttacatttgtgtgctcaagacttggcatatattcaaggattgacagagaatagagaaataatcattaaccaataaacaataatcgaaatggaaaatcaggaacttatcaagcaggtcactgagaaagccgaaaaatggctgaccccggcttatgatgccgaaactcaggctgaagtgaaacgcatgttggagaacgaagataaaaccgaattgatcgaagcattctacaaagatcttgaatttggaacgggtggtttgcgtggtatcatgggagtaggtagcaaccgcatgaatatctatacggtaggtgctgctacacagggtctttccaactatctgaagaagaacttcaaagatctgcctcagatttctgtagtggttgggcacgactgtcgtaacaacagccgtctgttcgctgaaacttcagccaacattttctcagctaatggaatcaaagtatatctgtttgatgatatgcgtccgactccggaaatgtctttcgcaatccgtcacctcggttgccagagcggtattatcctgactgcttctcacaatccgaaagaatacaacggttacaaagcatactgggatgatggtgcgcaagtactggctccgcacgatgctggtatcattgatgaagtgaataatatcgcttccgctgctgatatcaagttcaaggggaacccggatctgattcagatcatcggtgaagatattgacaagatttacctcgatatggtgaagacagtttctattgatccggaagctatcgcccgtcataaggatatgaagatcgtttatactccgattcacggtacaggtatgatgttgattccgcgcgctttgaagatgtggggattcgaaaatgtatttactgttcccgaacagatgatcaaagacggtaacttcccgacagtaatatctccgaatccggaaaatgccgaggcgctttctatggctgtcaatctggctaaagaaattgatgccgaccttgtgatggcttccgatccggatgccgaccgtgtaggtatcgcctgtaaggacgacaagggtgaatgggtactgatcaacggtaaccagacttgtatgatgtatctttactatattctgactcagtacaaacaattgggtaagatcaagggtaatgaattctgtgtgaagactatcgttactaccgaacttatcaagaagattgctgataagaataacatcgaaatgctcgactgctacaccggatttaaatggatcgcacgtgaaatccgtctgcgtgaaggcaaaaagaaatatatcggtggtggtgaagagagttacggcttccttgccgaagacttcgtacgtgataaagatgccgtatcagcttgctgtctgattgcagaagtagctgcatgggcaaaagataacggtaagtcattgtatcagttgttgctggatatctacgtagaatatggattctcaaaagaattcacagtgaacgtagtgaaaccgggcaagagcggtgctgaagaaatcaaagctatgatggaaaacttccgcgctaatcctccaaaagaactgggtggctctaaagtgattctgagcaaagactacaagacgctgaaacagacagatgctgaaggtaaggtgactgaccttgatatgccggaaacatctaatgtactccagtacttcactgaagatggaagcaaagtttcagttcgcccgtcgggaacagaaccgaagatcaaattctatatggaagtacaaggagaaatgggttgtcgcaactgtttcgcttctgctgatgctgctgcaatggaaaagattgaagcagtgaagaagtcattaggtatttgattccgttcttcttctgatatttcagaatagagaaacaataaataacgcctccatagtcttcgagactatgaaggcgtttcttttatgtaaccgccttttcatcggtctttcatttcctttgcattctttaagttcccttgctaatccttcttatggaaatcttgttctatctaaatcatctcaatttaaacatgcaggctacggggatacacggttttgttgatgctttagagtgatacgtaacgtttcattttcataagttgttcgtttgtagtttgtgtgtacttcgtggcctgctttcttactaattccatagatgtatagaaaaatatttttcatgcgtgaatataaaaaagcccccgtagaaggacgagggcaacctaatgttttcacaacggaataatccttattgtgatttgcttcaattagtatgacaaagataataaaagaatttgatatataattctttttgtaggaaaaaagtgatatatttggtggaaaatgtaaaacacacaagtatgaagaagatattgggattagatttgggtacaaatagtaccggatgggctttggtaaatgaagcagagaatacggcagaaaaatcgtctattacgaagttaggagttcgtattattaagtatgataatttcgtgaatactgaaacagggtcagagagcaaagaacctgaaaaggatttctgtggaggtaaggggatatcccctaatgccggtcgtacaaaaggcagaagtgctcgtcgtaatttgcaacgatataaattacgtcgtgctaatctgatagaatacctgaagaaatgtggattgattacagattccgcagtattgtgtgagaacggcaatcgaacgacttttcagacttatcgtttacgtgcaatggctgtaacggaagaaatttcattagaagaattgtctcgcgttttcttgatgataaataagaaacgtggatataagagtagccgtaaagcaaaattgcctgatgaaggacagttgattgatgggatggcagtagcagaacagctatatgaaaatgatttaactcccggtcaatttgttttttccatattacagcaagggaaaaaaagtattccggagttttatcgttcagatttgcagaatgaattaaatcgaatttgggatcatcaaaaacaattttatcctgaaatattgactgatgagtttcgaaaacagatagaaggggaaggaagaccgaatacagctaaaatgtttttaggtaaatataagatatacacggcagatattaaagggaaagataaacgtttacaggcttatcaatggcgttcgaatgcgttgacgagccaattgtctatagatgaagtcgcttttgttgtcagtgaactaaatggagccattaataatgcgagcagttatttaggagcgattggtgatcgtagtaaagaactgcgctttaataagttaacagttggacagtacttgatgaagcaactagataaggatcctaattatagtttgaaaaatcaagtgttttatcgtcaggattatttggatgagtttgaagctatttgggaaaaacaagctcaatatcatccggaactgactcctgaattaaaaaaagacattcgtgatattattatattttatcaacgaccattgaagagtcaaaaggggttggttagtttctgtgaatttgaaagtcgccagatagaggttaatgtagatggtaaacagaagttaagaactattggatgtaaggtatgtcctaagtcttctcctttatttcaggagtttaaaatctggcacactcttcattctttgatagtgaaagagaaaaaaacgaatgcggagcgtttcctgtatcaggaagaaaaagagactttgtttgcggaattgaatataaaggagacgttatcaaaattggatgctctgaaacttttatataagaactataaggatttagacttgaattacgataaaatagaaggtaatcgtactcaagcggcattgtttaaagcctatcaaacaatcatttctatgacagggcatggagaatatgatttctctaagatgatgtcggatgaggtaatggaaatagtagaaggcgtttttagtggactgggttataatacgaatatattacattttgatgcggaaaatgaattatttgataagcaacccatgtatatgctatggcatcttttatattcttatgaaggagataagtcgagcacgggaaataaaagtctgatagataaaatatttaagttatgtggttttgaaaaagaatatgcaagcatcattgctaatataatttttcagcctgattatggaagcctgagtacaaaagctatacgtaaaattttacctagaatgaaagaaggtaatgaatatagtttggcttgtgaatatgctggttatcgtcactctcaacgttctttgactaaagatgaattagataataaggtatataaggatcatttggatcttcttccacggaacagtttgcgtaatccggttgtcgagaaaatcttgaaccagatgattaatgttgtcaactttgtggtagatgcttatggaaaaccggatgaaatacgtattgaactagctcgcgagctgaagaagagttccaaagaacgcaaggaaatgacaatggcgattaataaaacgactgctgaccatgaaaagtatcgtcagatacttcaaaaggaatttggattaacaaatgtgactcgtaatgatatcattcgttataaattgtatttagaattgaagagtaatgggtataaaactctttattctaatacttatatacctcaggaaaaactttttagtaaagagtttgatattgaacatattattcctaaggccaagttatttgatgactctttctcgaataagacacttgaaagtcggagagttaatattgaaaagagtaatctgacagcttatgactatgtattgggagtatatgatgagaaaggtatcaatgattatgaaattcggatagagaatttatataagagtggaattatcagtaaggctaagcgagataaattgatgatgaaagaggtggatatcccaagtggatttatagaacgagatttacgggattcacaatatatagcgaagaaagctcgggagatattggaagaactggtgaagtttgttgttcccactaccggaactatcacggatcgtttgcgtgaggattggcaactgatagacgtaatgcaagagcttaattgggaaaaatatgataaattgggacttactgagatagtcaaagataaggatggtcgcgaaattcgtcgtataaaggactggacaaaacgtaatgatcatcgtcatcatgcaatggatgcgctgactgttgcatttacaaaaagaagttatatacaatatctgaataatctgaatgccagaagtgataagtccggtagtatttatgcaatagaacaaaaagaactttatcgggataagcatggaaaattaagatttaatccaccgatgccgcttgatgtgtttagggcggaagctaaacgtcaattggaaaatacgctgatctctataaaagcaagaaataaggttctaacgcagaatgtgaatatcacaaaaacgaaaaaaacagagagtggttatcgtaagaaagttcagttgactcctcgtggccagttgcataatgaaacattttatggagcaataaagtggtatgtacctaagttggagagtgttggttcaggttttaatgtggagcagatagcactcgttgccaataagagatatcgggaagctttgcttacacgtcttgcagcttgtggaaatgatcctaagaaagcttttactggtaagaatagcctggagaaaaatcctctttatttggatgaactgcatactcagcaagtgccgacaaaggtgaagacggtgactttagagactgtttatactactcgtaaagatatatcttcggatttgaaaatcgaaaaagtaatagataggaaggttcgtagtatattgaaagaacgattaaaggagtttggaggagacccaaagaaagctttttctaatctggatgcaaatccaatctggttgaataaggaaaaaggaatttctattaaacgggtgacgataacagcagtaagcaaggctgaaccattgcatgcaaagagagatcattttggtaagtatatattggatgctaatggggcaaagcaacctgtagattatgtaaatacgggaaataatcatcatgtggctatatatcgggatgaaaaaggtgtgttgcaggaacgtgttgtctcgttttatgaagcaactgcttcagcttctgttggtttacctgttgtggataaggaatatagaaagtctgaaggatggacgtttttgttttcaatgaagcaaaatgaatattttgtttttccaaatgagaagaatggctttaatccaaatgagatagatttgatggatccggataattatgctttgatcagtccaaatttgtttagagtgcaaaaaattacatcgaaagattatgtctttaggcatcatttggaaacgacagtagaagataggaaagaattgcaaaatattacttggaagcgatttcaatcacttactaatttagataaattagtaaaagtacgagtaaatcatattgggcaaatagtatcggttggagaatattagatttaagagatgttctactttaaatatgattactatgattaagaaaacactttattttggaaatcccgcttatctgtcgttgcggaatgcgcaattggttattaaattaccgggggtagagaaagcggaatcgttaccagatatgatgaaagctcaggcagaggtaacaaaacctattgaagacttgggagtggttgttttggataacaaacaagttactatcacttccgggttacttgatgccttgctcgaaaataattgtgcggttatcacatgtgatagtaagagtatgcctattggattgatgcttcctttgtatggaaatacaacacaaaatgagcgttttcgacagcagttggatgcttcattgccactgaagaaacaactttggcagcaaactattcagatgaaaataaataatcaagcatctgttctgaaggattgtgtggatgaggaagtaaggtgtatgcgtgtgtgggcatcagatgtacgtagtggtgatcctgataatttggaggcacgtgctgctgcttattattggaagtcattgtttgcagatattgaaggatttactagagaacgtgaaggcatatatcctaataatttattgaattatggatatgctattcttcgcgcagtagtagcgcggggattagtgacaagtggattattgccaacattaggtattcatcatcataatcgctataatgcttattgtttggcggatgatataatggagccttatcgtccttatgtagatgaattagtctttaaattggttcagattaatggaaaagtgttagacttgacgaaggagataaaagcgaagttacttgaaatacctactttggaggttaaaataggagggaagcgaagtcctttgatggttgctgttggacaaacgacggcatcgctttataaatgtttcagtggggaagttcgtcgaatttcgtatcctgaacggtaatggatcgatttagtgaatatcgagtcatgtgggtgcttgttctttttgatttgccgactgaaacaaagaaagataagaaggcttatgcggatttcagaaagaatttgcaaaaggatggttttacgatgtttcagttttctatttacgtgcgtcattgcgctagtagtgagaatgcaatggtgcatataaaaagagttaaatcttttctccctgaatttgggcagattggaattatgtgtattacggataaacaatttggggacatagagcttttttatgggaagaaaatccaaaatgtgaattcaccaggacagcaattagaactgttttaaaataaaaatcccgcattgacgcgggattttttgatggaaacaactctcttttttcttttctgaacttctttgtaaattgttgattcacaatgtgtaagtgataattagttgtgtccaatggttcaaagatactaaattgaaagcaaatcacaacacacttaatcctgccttttccatttcat

SEQ ID NO: 4610 - DNA, 14753 bp, Unknown
  gut microbiota DNA sequence
caggaagtccctgagaagatggtgcagttgcaaaaaacgaagaaagaatttgaaggacatttgacactggtcgtgttcccttttctgaaaatgtcaagaaaaggaccggaacagacagcgcaggaaattggcgaatatctgaaggcgaacgaaccggctgtagctgctttcaatgtgataaaaggctttttgaatctgactattgcatcggctacctggattgagttactgaatgagattcagtcggatgaagagtacggcctggtgaaagctaccgaaacttctccgttggtgatgattgagtattcttcaccgaataccaacaagccgcttcacttggggcatgtgcgcaacaatcttttgggaaatgcgctggctaacattgtggctgcaaacggaaataaagtagtaaagacgaatatagtaaacgaccgtggtatccatatctgcaaatccatgctggcatggaagaaatacggaaacggcgaaactcctgaaagcaccggcaagaaaggtgatcatctggtaggcgactactatgtgtctttcgacaagcattataaagcggaacttgccgaactgatggaaaaaggcatgacgaaagaggaagcggaagctgcttctccgttgatgcaggaagcccgcgaaatgctggtgaaatgggaagccggcgatccggaagtacgtgccctgtgggagatgatgaacaactgggtgtatgccggatttgatgagacttaccggaagatgggtgtcggcttcgataagatatattatgaatccaatacttatctcgaaggaaaagagaaagtaatggagggactggaaaaaggctttttcttcaaaaaagaagacggctctgtctgggctgacctgactgccgaggggctggatcataagctgcttcttcgtggcgatggaacctctgtttatatgacgcaggatattggtacggccaaacttcgtttcgctgattatccgattgataaaatgatttatgtcgttggtaacgaacagaattatcacttccaggtactttctattctgttggataaactcggttttgaatggggtaaaggccttgtacatttctcttatggtatggtagaattgccggaaggtaagatgaaatctcgtgaaggaacagtcgttgatgccgatgacctgatggaagagatggtatcgactgcaaaagaaacttcgcaggaactcggaaaactggatggtctgacgcaggaagaagcggatgatattgcccgtattgtcggtctgggtgctttgaagtactttattctcaaagtagatgcccgtaagaatatgactttcaatccgaaagagtctattgacttcaatggtaatacaggaccgttcattcaatatacgtatgcccgtattcagtctgtgcttcgtaaagcggctgagtctggaattgtgatacctgaacagattcctgctggtatcgagctgagcgagaaggaagaaggactgattcagatggttgctgactttgcggcagttgtaaaacaggccggagaagactacagtccgtctattatcgcgaattatacctatgatctggtgaaagaatataatcagttctaccatgatttcagcattctgcgtgaagagaatgaggcggtaaaagtattccgtattgctctgtctgccaatgtagcaaaagtggttcgtttaggaatgggcttgttgggcattgaggtaccttccagaatgtaatacttgccctgaacaaaatatatttatgtgttccggaacgggactgggatgttgttgaatagaaaaagactgtccgaaaaggaattgtacactatctttaagaaaggctttgggtaaagttaatgatagggattacatacttttcagacagtctttgtattattgggtaattactttcgaattatcaggatctttccaccaatatggattggaagcgccgaagctggatgcccagtcaccaaatttaggatacgcttccaaaatgcttgtcgtttctactggtacgagaaaatcggcacttcgtttgattcctacactgataccgctaatctgtagtcccgtcggcatattttcattatttacgtaatataatccctcatcaggtctggatacatcactgcctgtaccgaaataagagaaattcattttgtttgtcggagggaatttcacaatatgtgcttctttatcacgtcctgtgctggtagaaatgatgataaaggggttcatattaaatttgctgtatgtcttttcccaatattcgttattaaagaaaggggtgaatgccgtttctgtaaatctttcttgagcgacatctatcgttactgtaaatgttttgtttatagctgctttttgattgtcaaaaaggataatagtgggataattttgaccaggctcccggtcttgcccctccatgaattgtgagacgattccgtcggattctacggttattttctttatatcactatttgctatacctgtgagctggtaaccaaaaccattctgccagtttgcaccatcatgtttaggcacaaatgtatctataacttttacgactttacttgtgagaacgctcttataaatctcacgcttatattcgacaaccatatcattcatgtcataatctcctttggatggccaaaaatcttcaaatgataatacacctttaaaggagttataaatctctttgtcgttaatggatttgtcagggagttcttctacaccaccagtctcaatggctgatccatctgagaaatcaagatagaatacggcatcgccaaagtttccttttctggtattatctcctgtcggttcgaagttggttgcatcctccataccaaatgcaacgacttctcctgatttgttctttagggcaatggtacggtgttctttgctcttattcagatcacgaatcgaatagaaagtacgtttattgttcagaacctcctttgtgctttggttgtaggaggactcaataaggaaccatgctatgcttactcccgcagggaactcgttcacgaactttgtgccatcccaatatttcagttctactctgtcgccggtatacatactacctgctgtactgctggaattacacacggcagtcgatatgcgcggataggcaatgatcggtgtaacttgacttatatcagtcggcttttgatcggtagggtaggtgaaataaccgactgtattttgcttggtacctgtactgctgagcataaccagtccgatttccgtaggcttcttaatattgatctctatatttacattatcatctatatattcaggataataatcttccatcgctgcacttccacccggtttaataaaaacttcgcggatattatacatgagctgcccatctatttccgtcggagtagaagaaagataagtaggacatcctatctcattccattcacctaaaatctgaaaaccttccggatatttgtagccgctattggtaacccctctactcgtacccttcgcatttctcttactttgtataaaagctttctgatcaaaagatacttttccgtttgtaatttgtagttgaatcgggctgacagttcccagatagtctgaataaaggtaaagttctgtaagataagatggaatggatatgaaatcattaaaaattccttttttatccgtagccccgcgatagacaggctcttcttttgtcttgataatgtttccatcctcatcttcctcaagcggattttcggcatataactcaaatacaacttgataatttaaaccatagtttacatcaactgtgcaactggaggatgttgtaaagccaaaatattcatctgcagttttttcttctggagcctgatataagtccttttccatacaaccgactaacgagagtgcgcatagtacccccattgagagagatttgaaattgtttgtttgcataactgtgttctgataatttgattgtaacccgcaaatgtatgcatttaatatatcaaaacaaagagtttggaaataaatcgtttaaaaagaaatatatagcatggtaaatacaacaaaagtccggtaaccagttgatataggttaccggactttgatgtctcattggatgcaaatattatttcttttttgcagttcgtttacctttggcagaagtgccaggacctttctcatcttgtattttgattagatccaagcaactcttcagacttagatcttgaggaacaatgtctttagggatcttgtaattattgcctttgtatgcaatgtaaggtccgtaccgaccattcagaatctccagttccggttcttcatcaaacttcttgatatggcgttctgcttctttcgcccgtttttccagaatcagctgctctgcttcttctagagtaactttcatcggatcaagtgttttcggcagtgatacatagaccttgttatgctggatgtaaggaccaaagcgacctatacctacagtgacagtctttccttcatattcccctaaagtacgcggtagcttgaacagttccagtgcttcctccagggtaatggtctccatggactgccctttcttcatctgggcaaagcgaggcttctcttcatcatctgcggcaccgatctgtactacagggccgaaacgaccgattttcacagatacaggcttgcctgtttccggttcttctcccagcatacgttcgccgactttatgttctgtctttatggataatgtcttttctactgccggatggaactgatcatagaaagtcttcatgatcgaagtccattttacttctccttccgctatttcgtcaaattccttttctacactggcggtaaagttgtaatccagaatatccgggaagtattcggtaaggaagtcattcaccacagttcctgtatctgtaggaaagagtttcgacttttctgctcccgtcacttcattgtgactttcatctttaatctgattgtctttcagtgtcagcacattaaatgtacgttcttcaccgtctttatttcctttttccacatattcgcgttgctgaatagtagaaattgtaggagcgtatgtggacggacgaccgatgcccaactcttccagtttgcgtacaaggcttgcttccgtatagcgtggcgggcgttgagtgaaacgttcagtggcaacgataggtccatattccagtttctggcctttctttaaaggaggcaacagacggctttcgtcttcctgttcattctcatcgtcataagactcacggtatacacgcaggaaaccgtcgaacttgataacttcgccgatggcagtgaatacatcaccgcttttgcttatagagatggtagcagtagtcttttccagttccgcatccgccatttgtgatgcgatggtgcgcttccagatcagatcgtacagtttcttttcctgtgccgtgccttccacggattgattttccatgtaagtcggacgaatggcttcgtgtgcttcctgtgctcctttcgtctttgtttcaaagtggcgcggatgtatatagcgttcacccatcatctgtatgatagcgtctttgctgctggctgttgcatattccgacaggttgacggagtccgtacgcatataagtgataaatccggattcgtacaaacgttgtgcgatcatcatcgtttgtgctacggtatatcccagtttgcgtgccgcttcctgttgcagggtggaagttgtgaatggagccggcggtgttttctttaccggacgggtggttatatcttcaatcgtaaaagtcgctcccttacatgcgtcaaggaatgcttttgcttcttctttcgtcttgatacggcgtgacagttccgctttcatttctaccagcttgccgtctgtatcgggaaccaggaatatggcaataacccggtaagcggcttctgatttgaacgcatgaatttcgcgttcacgttctacaatcaggcggacagctaccgactgtacgcgtcctgccgacagagatggtttaacttttctccaaagtacaggagacaattcaaaacctacaattctatccaggattcgtcgtgcctgctgtgcatttacgaggttgaggtcgatattgcgtggttgctcgattgcttttaaaatagcacctttggtaatttcgtgaaatacgattcgctttgtgttttccggttttagttttaatacttcatacagatgccaggcaatagcttctccctcgcggtcctcatcggatgcgagccatacggtttctgcctctttagcttctgctttcagcgtgctgaccaaagcctttttgtctgccggaatttcataatcgggtttaaaattcttatctacgtcgatactgaattctttcttcttcagatcacgtatatgtccgtaactagaaaggactttgaaatctttcccgagaaatttttcaatcgtttttgcttttgccggagactcgacaatgacaaggtttttttgcataattctttcttttataatggcttgtaccataatatttcggggcaaaagtaaaaaaaaagattcgccctaccttataatataaggagaaactaatatttttttggaaaaaaataggttttgagtaaatctgcatttcttttgtatgtgcaagtattattaaagaaatgttctataattaaggggaaattaatataaaacagttttatttaaatagaatttcctatatttacacctttgtacagtattatgtggctatttatgagaaagattctatttaaaatatatctattgtttttctttgtaggtattgcacaacctatattgagccagtctccttattattattacaaacaactcggaataaaggaaggactctcacagtcgaaagtacaatgtgttctgaatgatcatcgggggtatctttggattggtacggaatccggtttgaattgttatgaccgtgaccatctgaagcaatatctgcatcggccgggagatgaaagaacgctcccttccaacaatatcacttttatcgccgaggactctttatgcaatctatgggtagctacgatgaatggcatttgcctttacgacagagggagtgatagtttcagaactttatcgaataatggtaaaccgatctatgttgcttcctatttattggttgaaggaggaatcttactgggaggatcaggagctatatacaaatatgtctatgccactaataagctggaacctttgtattatgcgcaagaccctgtttattacaatcccttttggcagatgatacgttatgatgaagagaatatcctgctcaattcacgttggcacggcatatattccttcaatatgaagacgtatgaagtgaagaaaatagagtcgtttacagaaaataactataccagtatctatctggactcctacaagcgtctgtgggtaagtgtttatggtaacggactgtattgctatcagggagaccagttgataaaacactttacggcgtcaaattctcctttgacgtatgatgtcattcatgatatcatggagagagataatcagctttgggtagccactgatggtggtggaatcaatataatctctttagatgatttctcatttactaatattcaacaaaaacaggatgatgttcattcctttccagccaatactatataccgcctctatctggacccggccaataatatgtgggcaggcagtatcagaagagggttgattggtataaagaatgtgtatgcctgttcttatcagaacgttccttttggcaatctgtacggattaagcaaccagactattaatagtttctttcaggatagtgacggaatagtctgggtgggaactgatgggggaggtatcaaccggtttgatccggtatcgggtaccttcaaacattatcctgctaccaaatatgagaaagttgtctccattgtggaatatactcctgacgaactgttgttcttctcctttaataaaggactctttatctttcataagcaaacggggcagatacgtccctttgtgctgattgacaaggaaatgaatgatcagacctgtatcaatggtttttctgtcaatatccagcggataacgaagactaaaattcttttcagtgcccagcatatttttatatatgatatggtcacccgtaagtttgatatagtggctactatgggagaagagtacgagcgtcattctccactgataatagctacgaaaggtgcaaagacatacctttccgatctgaagaatatttgtgagtatgattcttcggaagggactttccggacgatttatcaaggacaatacactatcaatgacgcctctatggatcaggatggtattttttggctggcttctaccgaaggtttggtacgttatgatccacggacagggaagagtgaactgataaatacaagcctgtttcaggatgtagcttctgttgttgccgataatcaatatcgaatctggataggaacgagacgtcatttatttgtttattcttcccgtacccataattttactaccttggaggaggtagatggagtcttgcctaacgaatacatctttcatgctactcttctggccaaaaacggagatgtttttgtcggtggaactacaggcatgacggtgataaactctgccgttcattttgatacagatgaggattatacggtcgaactgctggatgtattattaaacggtctgcctgtctcgttatccgaagagccgcaggaagcggctgaaacaattcagattccctggaacttttcttccctgcaactgaaagttctgctgaatgaaagcgatgtgttccgcaagaatttctttcgtttcaatatagaggggctcgatcaggaattggcgagttccaattcaaactctttggttatcaattatctgccgataggggagtatacgattaccgcttcttattatacccgtgacggagggtggagtatgaaacaacccattctgcatgttgtggttactccgccttggtggaagaccggttggttctatgtgggattatatatattgttgggagcagtggcttatagcattgtctactacttctatcgcaagaagaaagccaaacagaagcgggagattatgcgtctgaaaaataagatgtatgaagaaaagattaatttcctgacgaacatcagtcatgaacttcgcactcctcttacactgatttgtgcaccattgaagcgtattatcaatcaggagtcggacaagcaggatgtggaaaagttgttggtcccgatctataagcaggcatatcagatgaagaatattattgatatggtacttgatgtaaggaaactggaagaaggaaaagatatgctgcatatattgccgcatcctttgaatgagtgggtgcgctctgtcggagataagttcatcaatgagtttcatgtgaaaggtatcagactcgaatatgagttggacgaacagataaaagaggtacctttcgatcagaataagtgcgagttcgttctttctaacttcctgatgaatgcgttgaagtttagcgaatcgggcaccactactacactgattaccaccttgtcacaagagaaagactgggttcggatctctgtcagggatgaagggatgggactgaatatggtagacacagactctcttttctccagtttctatcaggggggacatgaaaaaggaggaagcggcatcggattatcctatgcgaagagtctcatcacacaccataaaggaagagtgggcgcttcgaatgcagcgggaaaaggggccatcttttattttgaactacccttattcacggatacttgcggacagctggaaccggcttctgtggaagcagctacaggcgtggaagtgaatgaaccggatagaatcgattataccttcctgaaaaaatattcagtgatggtggtcgaagatactcccgaactgcgaagttatctgaaagaaacgctgagtaattattttgcccgtgtatatgttgccaaggatgggaaagagggattggaacagatcaaagaccgattgccggatattatcatcagtgatgtcatgatgccccggatgaatgggtttgaactttgccgggaagtgaagactaatctggatatcagccatattccttttgtcttattgaccgcctatcataattctcagaatatgtataccggttataagactggagcggacgcctttttgccgaaacctttcgaaatagacggtttgctggcattgattcataatcagttgaggcagcgcgaacagatacgggcaagatataaagatgataagctcttgacgcataaggaagtgagctttagtaatgcggatgagactttcctgctgaaattgaatacattgattgcggataatatgagtaatccggatctggatgttgcgtttatagctactaatatgtgtatcagtcgttcgttattattcaataaagtgaaggccatcacgggtatggggattgtagactatgtgaataagcagcgcattgagcagtcaatcgtgttacttactactactaccatgaacattactgaaatctccgaagtggtcggcttctcttctttgcgttatttcagtaaggttttcaagtctattaaaggagagattccttccgcttataggaagcaggataagtaaatcgcattgataacttggacttaggaacatatactagaaataaaaaaataaatattagtctcatgctctcattctgtatgaggtaaatatcatataatcagaacgatatgtaatgagagatacttcttttgcaaggtatctctcattgttttctacgcaaaatggctttaattaggcttatctctcatccttttttgcttatctctcattccctttccttgcgtaagtaggtaaacagactaccctttgagggttaatatctcatatatcagtttcaaataacaggtactttgtagctcggataccttatatctttgttatatcaagcctatatacttctgttttcttaccgacatcttcatcgttccacccgggtgaaacgatcttgccactagagtggagagatctgttcactctagtgatgagatcagatcactcgagtggaacgatgaagatctcctattaaaaatctgataacaataggtgaaaagtacgacaggatagggtcttctgcataagagaaagcggtatatcccgtctattccatcatttctctgcctacaacgtttatgagctttaagtcatagttatcatcgtgggcatcttggaataattgccagatcatcacgccggcatagtcgttttctttgatgaacttacatttgttggctatagtagggcggccgttataataagtcttgcctatattatccttgtccgctgcttcatttccaagatgtttgagtatgccgctatagcggattccacgaacggcatccactgcgccttgcagactttcctcccaggaatatccataaaaaggaagtcctcccactattttacttttggctgcacggcattgttcattccagtatttgaggtctttcacaaagtcatcgtatgaagcatgctggaccggtttgtcggtaaatgctccccggtcataactcatcaggttgatatagtcgaagtattgctcccattcggttccgtaattaagccagcggctgttgacggcacaggtcatcagcatatttttctcttttgccaggtataaacctctggcaaaaaccaataatgaggggaaattcttatcccagttgtcatattcctcataatcgatgtcgaagccgtccagtttatattctttagtgaatgcaataatctgctgtatcagttcttttctggctttcggatcattgatggcggtagtgaattctcccggactgttctttgctaaagatatcagaatcttgacattatgcttgtgagccgtttcacgtacactttcaattctcttccggacaggctcgatgttgagtgtgccgtctgcttttacccttgcaaagctggcattgatatgcgtcagatacttccattctattgtaggaaataaattttcaaactcccagtcgtcaagcgcaagatagccgataactactttctgggtgacttccggttggggctgaggctgcggttgaggcacattgggcacctgtgggttgttggtattagaagagggtccgcaactagtgaataaaatgcttacagccgttaataatgcgtataataaatgtttcataatgaattgatattaagtgaataatgtttttttacgagtttataaccaaatgacttttccatcttcataaaggaagattctatgatgttcttgagtatttttactgcagtgacttaatttcaataatgcctttcgagggacattgttgaatataagatagctgccattcccttctttgcgttcaattgtacgccattcattttcccaatatgataattcatatgtgttcgatttgccaagccatgatcttatatagggacttattcctatggcagataatttgtattcattatttaaatcaaaatcaatatatcctttggagacttctccgctgaaggcggtatcgctcaatccgtcaattagcatttccggtttttcatcttcgttgttatgcggcaaaggagacaggatttgaatgccggtgatcagtttgtctgcactataaaatgaaagttctcctagggcaatgccgggcgatggtaaataaagccggacaaatcgatacgacatcgggtcgtctattctgaaaagttgatgttgtatctgtaatgtatcattgatggtatacaatagtttatcttttttcccatttttcattccccaaagttcgcttccttttaatgaagtcaggttcttcctgttctcgttgaacggcacttgacccgcaaaattgcgaattacgacttgccccttttctccgttggcagacagattttgcagggtaccgtcggattttaaccagaacggttgtcctgccggtatgcttttcccttttgcataataagtaggaaggtatacaatatcttttcccattttgtcgaatgttacttgttgcccttttatcttgccccactgaacaggaatccagtcttgatagttgtaaactgataaataagcataaccggggatcggattaatagaatctgtattcaataccactcgtacatcttgagtttcaaaatattcagaagatacatctttcttcttttcattcagaaatagaggtggaatatcctcacgtgtaactttctcatcggataatggaccttccatatgattggagaaagtcttgcgatagactttgggcagtctgaacttcccccaaaagctatcgtatgatttgttattataaatacgtttatatttccaacggtcgtcatcccaaaatgcttcaaaagcataagactctccgtttacaatgatcacgttccagctgtgccctccgttgcgattgccccatacgggaacgaaatctacggcggcggccattcctactgatgaaagtagcaaggagttgaaccagcatcgctgttcgcatgtaccggtttttatcttttcgaatgtagatgcagttaatattgggatgaatggaacatagtagggagaatgaacgatatctttataaagaaacaataaagagtcggtctcctccatgacgttctttccatgtgttgcataaaagtctttatgatggcgttgataatatctatctcttgaattgtcgattaccaatccgttttctctccggtatggcaagatgtattcgcaaaactcattaaacgaacaattttgtgtatatacgttccctttccatgctttgaatgccagttcaatttcagagataatagttgaggctgttaagtgctccgcatcgttcctgttttttgccatcaattcatctgagtatacaaagcagaacacttgccataaactgtcaatttcttctccgcatttcttatttatttcataattgtatttctttctgacattgtcgtatatcttgtaaaaaggagcatatacagtttgcaagttggagtcattggcgtatgatccctgcatgttggagattagaaacttggcagcttctagcttcaacgagtcgtttgcgtaatgttttaaaaccttttgcagttccgaacagttttctttggcggatgacaacgttttgtctaaagcacttttttgagtgcaagaaactagtagaagcattccggagatatataaataatttaaccatttctttttcatcatcctatcttttaaggtctatttccaataaaatgtatactccttttcgtagagttctctattccgttttccattgtcatttcttttaaaggtccagctataaatgacacaatgtaattgtattttatatattgaatccaagtcttttacatatcctcctttttgcagttctgataagttaacgtcgattgttttcgtttcttccggaataaaattaagatatgttttaattgaatgataaggatgtctactatagcctatctttttattattcttatcataaatgttcaaatcataaaagcttcctgtatcacttccatcattcgtttgagaatgccggagaatagcttcaagattcttatcgttgtttttgaaagtaaatgtcaggcatttcttttctttgtcaaatgtaacatcgaggctcatttgacgctgttgacacattattggtaacattgtaattagtaatactgttgtaataattgttttcattgtatttatatgtgc

SEQ ID NO: 4611 - DNA, 18520 bp, Unknown
  gut microbiota DNA sequence
gggcagggtagcaggccatgtgacattatccgaataatagttccagtaagccggagctacatcaggaatacagccatcttcgcgctgtgcttcgcggatgtcacgtgtccatttgttgtacatggcatgattgtcgaagaacagactttctccccaagagcccattgcatgatctcccaaccagggctgacgttcgttacgctggggacagtctaccggcatacctttatagttactccgaatcccccagaatgcattacgtataacttggttcaatgtttcgttcgaacaggaaaaagagcctgtatgatccatctcatcttctacgacttccactacgaaatcctcggttttggcatccggatatccgctgatttccacataacggaaaccatgatacacaaaacggggagcccaggtggcaccttgcggttcacgtccgctaactacatatatatcggtgcaatgtgcgtcgcgcagatttttcgtgaagatttctccatctgattccagacgctctgcaaaatgaagacgaatgctgtcgcctgcctgacctttgatacggaaacgtacccatcctgccagattctgaccggtatccataatgtatttgtcacccattttttggatagaaacaggtttcagcgtttccgttactttcatctccggcatcatttgagcacgaagtgtacccgaaggaatactgacgcgttctgccggcatccattttgtatcgtcataacctgtctgcgtccagtttcccagttctttgcgggcgtcatattcttcgccgtcatattcgttattgctgcggacaggaccttcggttgtcagtttccatgaagtattcgtcgcgattgtctccttactgccatcagcatattcaacgatcagattcaggcgtagtttgggatatccgaaggtcggaatcttgtatggtttgtaattctgacgcatggtataaaaacgaccattgcctaaagtaacaccgatggcgttctcttgctgaagttgggaagtgacatcgtatgtgttatacaagattgtcttccggtaatcggtaggagcgggggccagtacctgatcacctatgcgttgtccgttgatgaacagttcgtacaatcccattccggcgatgtgcactgtggcacgctttatttctttcttcaaggcaaattccttgcgaagataacgggctgccaggcggctccattgagtttcactgtcccccggagctgcacggtccagaccgatccactgaccttgccagtctgcttcattgaatagtcccatgctccagaaagccggactactccaatcactttcacctttattggtgtaaaccttcaccttccagaagtagggagcattgcgtttcaaattttctccctggtaggttatccattgggaagcatctgtttctacttttccggaatcccacatatctcctttcccttgtgccaatagctcgggggaagatgcaacaagaatgtgatatgcggtttgcatcacattctgttcgtccgattcgatacgccaacccagtcggggttggcgcgtatcgatacccgacggattctttagctgctctgtccgcaggttggttacgtctatggctgcacgtatcggacctgctgcaagaaacagaacagataagaatgataatataagtatctttttattcatgagtgtcaatttgatagagtgaatggaaactagactccggcaccttgacggtccggcagttctgtccagtctttcttcacatagtccttactactgtctactacaatcaggatatgatcgtttccgctgctgtagccgctatcgtgctggaacttgtgcacaccgttgtcaaattcaccgatatattccagtttaccatccttggtagtgtaccaccatgcgttcttcttggcaccgctgattttgctgaaatcaacttccatcggacgtccggtatagttatataccatcagatagtcattgccgcgtgttgcgatggcacggtcataacgttcgccattctgtccggcgatgacagactgatctggtactcgttcaaagaatgggaaagtcagcatcaggttcttcagatatttcatttgattgtatccgggatcattcagagcatcataccagggctttttagcaccataagcaccgcctacgcccggtttgataaactgcatgatggagttatgaccatacgtatgtccgaaagaaccggcaaatacagaccagtaagcgtaccggcgtacatcataatctttccaaagtaattcgttctcatcgtgcagaccgtgcggtatttcttcgtagatgggttcaccgtctataacgggcttcatcggtttcatagccatactgcgttctacaaaacgccagttgtcttcttccgtattttcttcgatgggataatctccgtcaccgaaacgttgtccataacggcggtgtccgctctggaacatattgaaatccagccatggtgcattgttgaaccaagtggcagaagtcgttctgccacgcgggtggaatgtcatcagatggttcttgtcgattgctttgatggaggttgccaatgcttcccattcggcagtcttcacatcaccacggatatccccaccgataaaccagataatgttaggttcgtctttatagcgttctgccaggaacttgccgtatgcttttgcctgatctacattcatttcgccatgacttaccggacttccccagatgcagaccatgccgatataaagacctttctttgctgcggtacggataatgtaatccatatgatcccaataaccatatacacctttctgattgatattcttgaagttgtagccgtcagtcattgaatactgtccgtagatattcatagacgggacattattcaatgtctgaacctgaatcacgttatatccgcggcgtttgcattgttccagataatattcggcttcgtcacgattcagacgttcaggcagcagccagccggtttctcccagccagaagaaaggaatgccgttttcgtgtttcagataacgtccttcttcagaaacgacgagtttgccgttgctccatgggatatacgtcttttgtgttttcttttgtgctgcggcagaggttgccaatgtcaacagcagcaataagagaggaagaatcttaaattttctcattgtactttatcgtttttggagttcatatctttacatttatttgtctgtcattttctcatattcgatggccgccagaataaacgatcctactgatttcgggtcattctctataaccggttcgctgatataatattcgaatgaaccgtcacggtatcttttggagtctccgcccagtccggctaccgcacaacaattcgtaatggtatagctgccgtcttcttcaagacgggtaaatgtcttgaccattccatcaaaagctttgcgggtaggttggatgtagtccttgccgatatatcccttattgacagctttagcaagtgtatagataaataaggcggttgccgaagattccaggtaatttccttcacgcgctccttgatctgttacctgataccaggtgcctgactgaggatcctgatatttcactaaagtttttgccaatctctggagaatctgcattacactgtctcgtccggtcgtttcctgaggtagataatccagtatgtctaccaaggctgctccataccatccaatactgcggctccagaagttaggagaacaaccggtttcgggatttgcccatttctgctcacggctttcatcccatccgtgatagtaaagccctgtggtggggtcgtaagttttgcgtgctatcagaagaatctgtttcacagcttcatcgtatagtgccggttcctggaaagtactgccatactgtaccaagtaaggagaagccatgaagatgccatccagccacatctgatgaggatatcttagcttatgccagaatcctccttcacttgtgcggggttgttctgccatctgtttacgtagggtatccatagctattttatagcgttcatctcctgattgtgcataaagatcaaaaagaatcttgccgccattgacgttatcaatgttgaatgaaagatatttcatcgttttaatatggccgtccgtatcgatcagactgtctgcatagattttggcatattcatagtaagtgctgtctccggtatgtttccattcttccagcatagactttacaacaagtccgtgggtatatccccaacggggtacttttgctttttcaatcatccagggttcgggaaaacgtttcatctcagagcgtgccatacgttcgctccatttttctgtttctgctttctgaggtgctgtgcaggcgatgaagcagacagctccgcaagcaacaatcagttttaacaagtttctgttcatataggtagagttattattttccaatcaatatatattcttgccctgctttggtaggcaggtcatacaagtaagtccttgcaatttccactttattcaggctggctttttcattcaccaatggctggggaatcgtggggactgcatagagagggttcgggttctctcctttggcacgtttcaagccctttccggtcagcgggttgagtgaacgtagacggcagttaccacctttatgagatttcacgaccaggcgatttacttttccattcttccagcttaaatcaagttcgaaacctccacgggcaatgatacctgtgacagaaccgtccttccagagagtcggaagtgccggaagcaggtaaataaagccatcgtaactttgcatcagcatttcggctatacctgcagaacaaccgaagtttccgtcgatttggaaaggtgggtgagcatcgaataggttagggtaggtgcctccttttttcttttcgttacgtaccaaagtcaattggtcggttatcagtttgtaggcatggtcaccatcaaggaggcgtgcccacaggcaaaccttccatcccatgctccatccggtggacggatctccacgatgaatcagagaagtgcgtgcagcgtcaaatagttccggagtacggtaaggggaaatctggttgctggggaataatccatatagatgggatacgtggcggtgtacatcgttcggatcatcccagtcgaacatccattcctgcaattgtccccaatgtcctacctgcataggagccatttctttgaggcgttgttccagatgagcggcaaattctttgtccgtatccaaaattcgggaagctgaaataatagctgtccaaaggtcgaatatcaactgattgtccatcgtgcatccggcggctgtagttgctttgccatcgctgccggaatgtacattttcgggtgagttgctcgggcagactaccagccagttgtgtacaggttcttttaccataatctcgtcaaagaacagtccggatcctttcaatatcggataaacggaacgcaggaactctgtgtctccggtgtacagatatcgttcccatagatgacggcacaaccatgcaccgccgctcggccacatacccgaaggggctttgtccagtgctcctgtgatacgccatatatccgtgttatgatgtaatacccatccgttggctccatacatgattcttgccgtttcctttccgctttcgctcacctcttttatcagccggaaaagtggctcgttcaagtcgcttaaattagtcacttctgatggccaataattcatttccagattgatattacaggtatatttgctatcccaggaagggaaaagtttatcattccagataccctgcaagttagcgggttgtccacccggttgtgacgaacagattaacagataacggccaaactggaagtaagtggcaaccagatgcgcgtcatgtgtgtccttaaaattctctacacgcttgtcggttgtcacatttttatattggtcttcccctaaatccagagatactctggtcagatattgacgataaaattcgacgtgattctttttggcttctgcgaatggatgaaccagcgcttccgacaaatagctctttgcacgttctgtctgattgcctgtgatgtccagataattattgaagttggtggctatagacacatagattgtggcttcgtcagctccttctacagagaggacgccatcggtacaagctatttttcctccttggttgcgggcggtcagccttccctgaaattctacttttcccttcagtccttcatgcaaggaagacacccctgaaagggttacgcagtttccttcttcagagttaatcattacatcctgatgaggggaggtgagctgtgcgttgaaggtaatttgtcccggacggttggcagtcagtcgtaccataactacctgatcggtaaatgaggtgatcgtttcacgttgatattgcactccgtctacttcataacggacgatggcacgtgccgagtccagactcagttcccgataataatcggaatagcgggtatgtccggggaaggcaattctcaggtcgccgaaactctgataaggcattcccgaatttgtttttgccatcactttctccgtagcgagcgtttgtgcttccagatattttccggcaaaaacaagttcacgtaccttcggaatatactccagtgcgttcgggtttgcgttgttgttggggcgtcctgcccaaatggtttcttcgtttagttgtatttgttctattcccggcgttccatataccattgcccccagacgcccgtttcccaagggtaaagcttcggtccatacctgtgcgggacggtcataccatagcttatattcctgtgcagatacttttttctcctgcgcatgaatacatcctgcagagaccattacaaacagatatccgattaatctctttttattcattttcatctaatcgcttttatacttttataggaggacgattaaaaaggaattttgtacccaatatacagacaataagaagcagggataatcaaaagttatcgggtataaaaaaaatgaacttcaatatctgctcaaaaaggtcttactttgtatacgtaagagcactaggaagaagttatttcctgagtgtggatttatttctttaatctaaaaaacagataattgaaaatgtataatttaatcgttagaccgttattatttctcattgatcctgaaaaagtacatcgaatgcttttgaactggttaaaaatctatcgttatctgcttccggttcgtgcctgcgtaagaggacactatcaagtggacgaacctttttcatacggaagcctgcgattcaaaaaccggataggcttgtctgccggattcgataaaaatgcggaaacatttgatgagttggcagattttggtttcggatttctggaagtggggactgtaactcctgattatcagccgggaaatccttctccccgtatcttcagactggtagaagacgaatcactgatctcacgtacagggttcaataattgcggtgtcgatgtagctctggagcatatcagaaaatacagaaaacattcttacagactcggagtaaatatcaataagaatccgctttctgccggtgagcaaatcatcaaagattttgagttggttttcactcgcttatatgaaagtgtagattattttacgctgaactggggtagtatagataaagaatcatttgctaaagttttagaaaacctcacaacatttcgtcaggcagtgaacaaacggtgcagtattttcattaagctcccggcggatatcgatgagaaggcattggatctggtcatttcccttgcatataaatattccatagaaggctttatagctacggggccgacgatggaccgctcagaattgcatcatacaaaaacaaaacggttggaaaagatcggtaacggtggcgtcagtggtcggggtatcggaaagaaatcgcagaaggtagtgcgttatctgtccgggcacaccgaccaccactttctgattatcggggcaggaggaataatgacagcagaggatacagctgatatgatttcccaaggggccgatatgatacagatttattcggcatttatctattctggtccgtctgttgttcataaaatagggaagaaacttaaacattaatcgatatgaagaaattaatttgtattagcttgtatgaggacttatccatgacgacctatgatttgtcggaagtggacaatgtcgaactgattggaatcgtagaaaatgcttccgaaggaactttatttgtttttacttgtgacaggcccaatggaagcagtgttattatgtgtcccggaggtggatttctgaagactaatctggagaatgaaggcattgattttgccgaatggtttacgaagctgggaattacatatatcgtctttaaatatagaatgcctcatggtaatcctgatgttcccgaacaagatatccggttggcattgaaggttgtgcgagaaaagtttccggagttttgtgataagctgggagtgatgggggcttctatcggaggatatctggcaactttttcagctacgcttttgcctgatgatgagaagccggattttcagatattgatgtatccggtagtcagtgtcgatgatcgtttgacacatcttccttgtcgtgaacgaatgtttggtcattcctattcaccggataaaatggagcagtattcaccgattgagcatattacttccggcacacctgccgctttcattgtagcagctgcagatgatgctgtggtaagccctctgaatggtattatgtatgctgccagactacagaaagcagatatccccatttctctgcacatctatcctgcgggaggacatggattcggttataatgatagttttgtgtataagcaagagtggcttcaggagcttggagaatggttggcaaaattgtaattcttttcttgtaattcgaaatatacttcctatatttgtcattagaatatttaatgaaaagaaattatgagaaattcaaaggttacatctatgttggtagtgctgatgtttttgttggtcacaggaatacaggcgcagaccgttactcccagtaagaaatatatcacaaaagaactgaataacgtaagcaacttcagttcaatcagagtattaggcagtcctgatgttgagtatcgtcagagtaatggttctaaaacgacagtttctatatacggttcggataatttggtagacttgttggaagtttctacagtaaatggagtattgcaggtgaatatcaaaaaaggtgtcaagattcttagtggagagcgtcgtttgaaagtgatagcttcttctccttcattgaatcaggtagatattaaaggttcggcagatgtatatctgaaaggtacaatcaaagggaatgacttgaatttgaatatagccggttccggagatatcgaagcggagaatctgcaatatgctaatatatttgctttggtaaaaggaagcggggacattgatttgaaaaatgtgaaagcgactactgtgatgtcagaagtaaatggttccggagatattagtgctgaaaaactggctgcaactaatgtcgttgctacagttgccggttcgggtgatatagtatgctacgcttccagacagttggatgcaagagttagtggtagcggtgatattgaatataaaggaagtccttcagttgtaaataagcaggggaagaaaaattcaattaccggtaagtaagatacgaatcttattttttatagaaagcgggcaaatatgttatttatcacatatttacccgcttttatttagacattcatagatctcttattgaagtatatacaatgactatatgttaaaaatatagttagccaagatacaattaacttgcagatctgttttatttatatgggcttatctgtattttctgatattgcacattatgaaatattattcaattaagtcaggtagtatatgaatttagatgaagttttaaattatcgtcgctctgtacgggtatatgataaagaaaaggaaatagatatagagaaagtaaagcattgcctggaattggcaactttggctcccaatagttctgatatgcaactatgggagttttatcacatcacacagcctgaattgatggcaaaggtatcaagagcttgtcttgatcaaaaagcaacttccacggcttcgcagattgttgttttcgtcacacgtcgtgacttgtatcggaagcgggcgaaattcgttcttgattttgagacaggaaatatacggcggaatagtcctatagacaggcaggagaaacgtattaaagacagaaaactgtactatgggatattgatgccgtttgtttatgcccgtttctgcggtatcttaggacttttcagagtactacttgctaatattatcagcattttccgccctatgatgctcgaagtatctgaaggtgatgtgcgtgtggtggtacataaatcctgtgcacttgctgctcagacatttatgattgctatggcgaacgaaggatatgatacctgccccttggaaggcttggatagccgacgactcaaaaggttgcttaagttgcctcatggtgctgaaataaatatggtagtttcttgtggaatccggaatggaaataaaggaatttggggagaacggtgcagggtaccgtttgaggaagtttatcgtaagatttgatggcacggacgcagtagtaaaaacgcctaaatatatatatactgaatgggactgccgagcaggctttgcagcagattgatgaaaaaggctatctgattccttatcagacagacgtgaagtcgtgaaagtaggagtggagttcagtgcggagaaaaggaatattggacgatggttgctttaaccagataacaattaatattaaagtgaatcctattagatgatcagatgtgcggagatatgccaagcatatctccgttttaattgacataatccgccggagtaaagggatgaatgatgcttaccgacgtgatttaatcgttttttaataaatgaaatttattttttcctgattatacaaatagtacaaaagaatcttcttgtttggtcttgttttttatattccgcaacatttcatcctttgtgtcatagtattagtcaccttcgaaacatttattgtttgtatccgacatggatggagtttggctagtccccaaatatacggatatttgtgaagtgagatttcactatcaaaagtattggtcctttcggaccggccgcctgtgaaggtagctctattgtttgttttgtttgtgtttggtgcatcttttttcaagcgagaaagaagatgcactatttatatctatctaccctgactagcggatattgaatgaaaatttgcctatgaaacagataaagcatacatttgaagaaaaaaaagaagatgggcgggaaagcatcaatgtggaacttatggcacggctgtcacaaatggagtgaaggctgccgccactgctatgtatatcgtacggatggcaaatatggaaaagacagttcggtggtgacaaagacggaaaagttcggtttgcctttgcagaagaaaaagaatggagaatataagataccctcgggaaatctggtatatacctgttttacctctgattttctgattgaagatgcggatgaatggcgtgccgaagcatgggaaatgatgcggatacggcaggaccttcattttatgtttataactaagcggatagaaaggctgcaacagtgcctgccaccggattggggagatggatacgacaatgtgacgatttgttgcacaatggagaatcaggacagagtcgattatcgcttacctatttataaagaaatccctattaaacataaaattattatctgtgaaccccttcttagtcagattgatttcaggggagaactggaaggatgggtagagcaggtagtggcaggaggagagtctggtaaggaagcccgcgtttgcaattatgactgggtgttggacattcgccgtcaatgtgtggaagctcatgtcggtttctggttcaagcagacaggaagttatctgttgaaagatgggcatgagtataaagtcgcccgacagttccagcactcacaggcaaggaaagcggaactgaattatactcccgaaaaataacgaaagaacaaacaggaataaaggaatgcgaaggctgtcggatagctttcgcattcctttattgagtacaaaatatggataatcacgtctctccttaaagagatagtgtgtaaattttaaaattatccatattaaatgaaacagataaagctgttattttttttagcttccgcctccgtcacgggagcatttgcgcagagcaatgggctgacggatatgagtcagagccgttatgcaaagatggcgaataccggaatagatgccgtacactggacgaatggattctggggagagcgttttaatgtatttagcggaacttccttgcagagtatgtggaatacatggaacacgccggaagtttctcatggtttccgtaattttgagattgctgccggtgtatgcaagggagaacattggggacctccgttccatgatggagatatgtacaagtggatggaaggagtcgcttctgtgtatgctgtcaataaagatccggaattggacaagttaatggacaactttattgcttgtgtcgtaaaagcccagcgtgcagatggttatatacatacaccggttgttatagaagaactgaataagggaatagacagccatacgctggctgattcccaacaacagacagtgattggtacgaaagtaggctctgaggacgaaaaaggtgcatttgccaatcggttgaattttgaaacgtataacttgggacacctgatgatggcaggtatcgttcaccaccgtgctaccggaaaaacaactcttttggatgctgccgtgaaagctacggatttcctttgtcacttctatgagacggcttccgccgagttggcacgcaatgcaatttgcccttcacactatatgggagtggtggagatgtatcgtgctacaggaaatccccgttatctagaactttcaaaaaacctgattgacattcgcggtatggtagaaagcggcacggacgataatcaggaccgtatccctttccgtgaccaatatcgtgcaatgggacatgccgtacgtgccaattacctgtatgcaggtgtggcagatgtgtatgcggagacaggggaacaacaactgatgaagaacctgactagtatctggaacgatattgtcacccgaaagatgtacgtgaccggagcttgcggtgctttgtatgacggcacctcaccggatggaacgtgctatgaaccggatagcattcagaaagtgcatcagagctacggtcgtccgtatcagttgccgaacagtacggcacataacgaaacttgtgccaacattggtaatatgctgttcaactggcgcatgctggaagtgacgggagatgccaagtatgcggagcttgtggaaacttgcctttataatagtgtattgagtggcataagcctggatggaaagaagtatttctatacgaatcctcttcgtatcagtgccgatctgccttatacactccgttggccgaaagaacggacggaatatatcagttgtttctgttgtccgcccaatacattgcgtacgctttgtcaggcgcagaattatgcttatacattgagtccggaagggatttattgcaacctgtacggtgcaaatacattgactacaaactggaaagataagggggaacttgctttggtgcaggaaacggactatccttgggaaggtaatatacgtgtaacgttggacaaagtgccccgtaaagcaggtgctttctccctcttcttccgtattcccgaatggtgtgggaaggctgcgttgatagtgaacggtcaaccggtgtccatgaatgccaaggcaaatacctatgcggaagtgaaccgtacatggaagaaaggagatgtggtagaactggtcatggatatgcctgtttgtctgctcgaagctcatccgttggcagaagaaatccgtaaccaggtggtagtgaaacgtggcccgttggtttactgtctggagagtatggacattgcaaatggagaaaagatcgataacatcttgattcctgccgacataaagctgactccgaagaaaacgacgattgaaggcagttcgatagtagccctggaagggaaagcacgtctggcatcgtctgagtcttgggaaggcgtgctttatcgtccggttgcccaagcagagaaaacagtggatattcgtctgattccttattatgcatggggaaacagaggtaaaggagagatgacagtctggatgccgcttgcaagataacccattgtacaaaagaaaaatgaaaaagttattagtaacaactatatgcctgttgggtgcacatctgctgtcagcaggcgaaatttggatttcgccgcaagggaatgatttcaatgacggcacacgtccatctccgaaagcgacgttgacttctgctttgcgtcaggcacgcgaatggcgccggacagatgatgaacgggggcggggaggaattacgatctgcatggaaggcggtacatatgcactctatgaaccggtgtttattcgtccggaagacagcgggacggaggattctcccacggtgatccgtccggtagctgatgaaaaagtggtattgagtggcggcatccggatcggtggatggaagaagcagggaaaactttgggtagcggatgtgcccatgttcaacgggcggccattggatttccgtcagttatgggtgaatgggaagaaagctgtccgtgcccgtgatgtagaggattttgagaagatgaaccgcatttgcagtgtggacgaaaagaatgagattctttatgttcctgcggttgccatacgcaggctggtagacggaaaaggggctttgaaggctaaatatgcagagatggtattgcatcaaatgtggtgtgtgactaatcttcgtattcgttctgtcgaactggctggagacagtgccgcaatacgttttcatcagccggagagtcggattcagtttgagcatccctggccgcgtccgatggtaacgacagatgggcataattctgctttttatctgacgaatgcccgtgaactattggatgtagcgggagaatggtatcacgacatagatgcccgtaaggtctattattatcctcgggaaggagagaagatgcaggatgccggcacggaagtgatagtgccggccatagagacattggtacaagtaaaagggaccattgaccgtcctgtttcacatatccgttttgagaaaatcacgttctctcatacgacttggatgcgtccgtctgagaaaggccatgttcctcttcaggcaggaatgtatctgacagacggttatcgtattgacccgaaaatggaacgggactatctgaatcatgctttggataatcaaggatggctggggcgtcctgccacggctgtaagcgtggctgctgccaatcagatcgactttgagcgctgccggttcgagcatttaggctcaaccggactggattatgaagaagccgtgcagggcggtgtcgttcgtggctgtcttttccgtgatattgcggggaacggactggtggtcggcagtttctctccggctgcccatgaaacacatttgccttacgaccctgccgaccttcgggaagtatgcgcgcatcaacaaatcagtaattgctactttaccgaagtgggtaatgaagattggggatgtctagccatcactgcggggtatgtgaaagatattaatatagaacacaatgaaatctgcgaagttccttatagcggcatcagccttggctggggctggacgcagacagtgaactgtatgcgtaacaacagagtgcacgcgaatctgattcatcactatgcaaagcatatgtacgacgtagccggaatttatacactgggctcgcagccgaaaagttatgtaactgagaattgcgtacatagcatttataagccaggttatgtacacgatcccaatcattggttttatctctatacggatgaaggctcttcttttatcactgtacgcgataactggacggaaggggagaagtatctgcaaaatgcgaacggtcccggaaatgtatgggagaacaatggtccgcaggtagatacagtcattcgtgaacgtgcagggttggaagccgaatatagggacttgaagaaataagaaaaaatgaaaaagaaatgcatgatacttctgggtgccttgtcattggcaagcagcacctttgcccaaacttggatatggtatccgggggactatgaaatctggctgggcaaccagatgaacaaccgacgtacggaacgtggtgctttttttcctcctttttggaaaacggacagtcattatgtagtcgtagagttcagcaagcaactgaatctttccgaaccggaagaagtgtttattgctgccgagggaacatataatgtgaagctggacgggaaacttcagttcggaatgcctgaaaccttgctgcttccggcaggaaaacatagtctgaatattaaagtatggaatcaggcaacgcctcccactatctatgtgaaaggaaagacggtaaactctgattcgtcctggcgggtaacttatgaagataaggaatggatcgatgaaagcggtaaggctagtgacacatctgccaccatctatatggatgccggatgctggaactttgacggtgccactcaacgtccttcccaattcagcctgatgcgtgaacctcagcaacctgtcgctaaaacagaacaatcggaaggaggcatactgtatgattttggaaaagaaacgttcggatttatcacattaaagaatctttcgggcaagggaaagattgacctctattatggtgaaagtccggaagaagcgaaagacaaagcatattgcgaaacattggataaactcctgctggagccgggacagatcactgatctcgctatccgcagcacatctcctttgcatcattctgataatgaatatacgctagagaacagcaaagcattccgctatgtatacatcactcacgaaccggaagtacaaattggtgaagtatccatgcaatatgaatatcttcccgaagaatatcgtggtaacttccgttgtaatgacgaggaactgaatcgtatctgggaagtgggagcatacacaatgcatcttactacacgtgagttttttatagacggtatcaagcgcgaccgttgggtatggagtggcgatgccatccagagttatctgatgaattactatctgttctttgacagtgagtccgtgaagcgtaccatctggctacttcgtggaaaagatccggtgaccagccatagcaacaccattatggattacactttctactggttcttaagcgtatatgactattatatgtatagcggtgaccggcatttcgtcaaccagctatatccacgtatgcaaacaatgatggattatgtattgggacgtacgaataagaatggtatggtggaaggaatgtccggcgactgggtatttgtggactgggcggatggctatttagacaaaaagggagaactttctttcgaacaggttttgttttgccggagtctggagacgatggcactttgcgcagatttagtcggagataaggacggacaacaaaaatatgagaagttagcttctgcattgaaagcaaaattagagccggctttctggaataatcagaaacaggcatttgtgcacaactgtgtggacggacgtcagagtgatgccgtaacccgatacgctaatatgttctctgttttctttgattatctgaatgcggataagcagcaggccattaaacagtccgttctcctgaatgatgagattctgaaaataacaacgccttatatgcgtttttacgaactggaagccctttgtgctcttggtgagcaggagactgtaatgaaagaaatgaaagcttactggggtggaatgctgaaagaaggagcaacctctttttgggagaaatataatccggaggaaagcggaacacagcatcttgccatgtatggtcgcccatacgggaagagcttgtgccacgcttggggagcaagccctatttatctgctgggtaaatactatctgggagtcaaaccaacgaaagagggctataaagagtttgctgtcagtccagtattgggaggcttgaaatggatggaaggcaccgtacctaccccgaacggagacattcatgtctacatggataataaaaccattaaagtgaaagccacggaaggaaaaggttatctgaccatccagagtcgccgtcagccaaaagccaatatgggaacagtggagaaggtttcggaaggtgtatggcgcctttggattgattctccggaagaaaggattgttacctatcgtatgtagtcagagattaggattgaaataagacctccggttgtcgtagctatttccgcaggcata

SEQ ID NO: 4612 - DNA, 9249 bp, Unknown
  gut microbiota DNA sequence
ctgacgtagcgcccggcttcaactctttgcggtgacaataaaaaactaagttccgcctattatcaccctattgtcacctcttattatcacccttaccattctaatttgcaacgtattaagtcgcaaaagtgacaagtgacaataaaaacgctgcataaaacgttgtggcgaataaccaaaggaggttcaaactccttgattcgacagacaacagcccttcacgttcagaccttgatttcgtcatttcacctgtcaatctttccgcttcatcttttcccgataatcacggataaggatagtccgtaactttgtaacatgaaacaataacactgtaaaatcatgtttaaagctatcgtacgtttttcgatcaggaaaaaactattcgtagggttaaccaccctcttcctgtttatcgggggaatctatgccatgctgacgctccccattgacgccgtgccggacataaccaacaatcaggtgcagattgtaaccgtatctcctacgcttgcgccgcaggaagtggagcagctcatcaccatgcccatcgaaatagcgatgagcaacatcatgaatgtagaagatatccgttccgtcagtcgcttcgggctatcagtggtaacggtcgtcttcaaggaagacgtgcccacactcgatgcccgccagctgatcaacgaacagatacagaccgtatccggcgaaatctcccccgaactgggaacaccggaaatgatgccgatcaccaccggactgggcgaaatctaccaatacatattgaaagtagctccgggatacgaagagaaatatgacgctatggaactccgtaccattcaggactggatggtgaaacgccagttatcgggcataccgggcatcgtggaaataaacagtttcggaggttatctgaaacaatacgaagtggcggtagaccccgacgccctgttttcgctgaacatcaccatcggcgaagtgttcgaagcactgagcagcaacaaccagaatacgggcggaagctacatcgagaaagcaaggagtgcttattacatccgttcggaagggatgatcacccgcatcaaagacatcgaacagatcgtggtagccaaccggaacgggattcccgtacacatcagtgacgtaggcactgtccgcttcggcgcacctaaacgtttcggtgcgatgacgatggacggaaagggcgaatgcgtaggcggaattgccatgatgctgaaaggcgccaacgccaatgtagtaacgcaggaactggaaaaacgggtggaaaagatacaacacttattgcccgaaggcatcagcatcgaaccatatctgaaccgttcggaactggtcaaccggaacatctccaccgttgtcaacaaccttattgaaggagccatcatcgtcttcctcgtacttattatcttcctgggcaacgtccgtgccggactgattgtagcttcggtcatcccgctggctatgcttttcgcattcatcatgatgcgtcttttcaacgtgaccgccaatctgatgagcctcggcgccatcgacttcggtattgtggtagatggttccatcgtcatactggaaggtatcctggcacacatctacagcaagcagttccgcggacggacactgacccgcaaagagatggacgaagaggtggaaaaaggcgcttccggtgtagtccgctcggctacattcgccgtactgattattctcatcgtgttcttcccgatactgactctgaacggaatcgaaggaaaatacttcactccaatggccaaaaccctggtgttctgcatcatcggcgccttgatcctgtcgctgacatacgtccctatgatggcgtcgctcttcctgaaacatgccatcgtagtgaagccgacacttgccgaccgattcttcgagcagctgaacaaactctaccagcgttgcctgcatgcctgcctgcatcacaaagcacgcaccgtagtcattgcttttgccgcactgatcggctccctcttcctcttcacccgcctgggtgccgagttcatcccgacactggacgaaggcgacttcgccatgcagatgaccttacccgccggcagttcgctttcggaaagtatcaaactctccgaagaagcggaaaagacattgatggatcagtttcccgaaatcaagcacgtagtggcgaagatcggtacggcagaagtccccaccgacccgatggcagtggaagacgccgacgtgatgatcatcatgaaacctttcaaggaatggaccagcgcaacaagccgtgcggaaatggtagagaagatgaaagaagcgctcgaacccctctcggaacgtgccgagtttaacttctcgcagccgatacagctccggttcaacgaactgatgacaggtgcgaaagccgatattgcagtcaagttatacggcgaagacacgcacgaactttatcagagggcaaaggaagccgccacatatgtagagaaagtgccgggggcagcagacgtcatcgtagagcagacgatgggattgcctcagctggttgtcaaatacaaccgcggcaagatagcccgttacggcatcaatatcgaagaactcaacacgattatccggacagcctatgccggggaagccagcggtgtggttttcgaaaacgaacggaagttcgaccttgtcgtacgtctggatcaggagaaagtggcagacttaaatctggacaagctctttgtgcgtacttccgaaggcattcagattccggtcggcgaggtggcaagcatcgaacttgtcagcggtccgttgcagatcaaccgcgacgctaccaaacgccgcatcgtgattggtgtgaacgtacgcgacgcggacattcagcaagtagtggccaacatccagaagacactggacaagaacatcaaactgcaaccgggatactacttcgaatacggcggtcagtttgagaacctgcaaaacgccatcaatacgctgatgatcgtcattccggtagcactaatgctgattctgctgatcttgtttttcgctttcaagaacattacttatacattgatggtattctccaccgtcccgctgtcacttatcggaggtatcgtagccctctggcttcgcggactcccgttcagcatctcggcaggagtcggtttcatcgccttgttcggtgtggctgtactgaacggtatcctgatggtgaaccatttcaacgaacttcgtaaacgaaataaatatgctatgactaccaaccgaatcctcactctgggcaccccgcatctgctgcgtcccgtattcctcaccggactggtcgcctcgctgggatttgtcccgatggcaatcgccacttccgccggttccgaagtacaacgcccgctggctacggtcgtcatcggcggactgattatctctaccgtgctgactttgcttatcattccggtattctacaagattgtcaactcattcgctgtatggagacgtcccggaagcaagtttcatctgccgttcttcgtcatcctgccgttgttactgctgattccttctttcgcctcagcgcagcaaccggaagcggtcagtctggaacaggccatcgagatagccaaacaaaatcatccgagactgaaaatagccgccaacgccatccgtcaggcaaaagccactcgcggagagattgtcgaggcagctcccacctcattcagttactcatggggacaactcaacggagaaaacaagcaagacaaggaacttgccttcgaacagagcctcggttcgctgctgactccgttttacaagaatgcactggtcagccgacaggtaaagacaagtacttattatcgccggatggtggaaaaagaagtgatagcggaagtaaaacgggcatgggcttattatcaatatgccgctaacctctgctccatgtaccgtgatcaggacaagatggcggaagagttgaaacgtatcggcgaaatacgttatcaacaaggagaaatcaccctgctcgaaaagaacatgatgacgactaccgccgccgatctgcacaatcgctggtatcaggcacaggaagaggaaaagacggcactggcacgtttccagtggtgctgttatgccgacaacccgatcgtgccggcagattcgaccttgtctctcttttataccactctttcggacggtaatctgtccgaagcgcataccggatacttccagagtcaggcggaagaagcgaaagcaatgcttcatgtagaacgcagccacttctttccggagatcagcgtagggtatacccgtcaggacattcttcccttgaagaatctgaatgcatggatggtgggagtctccttccccgtttacttcctgccccagaaaagcaaggtgaagcaagccagactggctgctgcttcggcacagattcaggcggatgccaacatccgcgaacttcgcaataaggtaatggaactggaagcctctctccgacgatacaacgagagcctgcgctattatactacttccgctctcaaagaagcggaagaactgaccaaagccgccaacctgcaactgcaacagagcgaaacgggcgttgccgaatacatacagtccgtcacgacggcacgggacatccggcgagggtatatcgaaaccgtctatcagtataacattgccgctctggaacatgaattgtttgaataaatggagagttttaatgaacaatttccctgttaatatagaagattattttgcaagagtacttaatataaaaatgtgtatgagaaagatattttaccccatccttctgctcgccttaatagcctgcaagggacaacaacaaacagcggattccgagtcagtgtcggtccccgcaacagaaagcatgaatccggaaatggagaaatccaatggtcaaagcgacgccgatgccactgcacagcccgaagtggatgcaatcacttccgccacttcccgccccaatcaggtttcgttcaacggccggatcgtccttccgccccaacggcaggcaaccgtcgcactgactatcggcggagtgatcaaaaacacttccttactccccggacaacacgttaccaagaattctgtaatcgccactttggagaatccggagtttatcaccctccaacagacttatctggacagccacgcacaaacagaatatctgcgtatggaatacgaacggcaaaagaatctctctgccgaacaagcggcttcgcagaagaagttccaacaaagcaaagcggattatctttcgatgaaaagccgtcaggatgctgccgccgcacaactttcgcttttgggcgtgaatccggaaacactgcttcgggatggcatccagccgcttctggaagtaaaagctcctatcagcggatatgtggtcaatgtagctatgaacatgggaaagtacatcaatccgggagaagctctctgcgaagtgattgataaaagcgcaccgatgctttgcctgactacctacgaaaaagaccttgcagatatgcaaacaggcagtcccgtacaattccgtgtcaacggcatgggtacacagacgttcaacggcacggtcatctccatcggacaaaaagtggacgaagtgaaccgctcactcgaagtatacgcttccatcaaggagacgaatccgcagttccgaccggggatgtacgtcacggcacatatccaaaaacaataatctgccgtgcagcgacagccattcatcatgcataattcgtaattaaccattatctttgcaacatggtattgaaagctatcaataaagataagtatttcctgtccacggtcatcatctcgctgatggtggctgtgctcattcattttccggaatcggtctctctcttcgaccgtttcgaaagccattcgcttttcccggggatgaagtttatggatgtggcaaatgagattctgtttaccttcgtttcgttactcatactttttgccatcaatacgcgcttgttccatttcaaccaggcgtccattaaaataacggctgcaaagattctgctttccttcatcctgacatggatactcagcaatctgctgggacaagtgtttgtcttcctgcaccggacattcgacattcccgccatcgatgcgatggtacaccattacctccatccgttgcgagacttcatcatggcctgcctcgtcaccagcagttgctgcatcatctaccttgtccgccgccagcaactggtattgattgagaacgaacagttacaggcggaaaacatccgcaaccagtatgaagtattgaagaatcagctcaatccgcacatgttgttcaactcactgaatacgctgcgttcactggtacgggagaatcaggataaggcacaggattatattcaggaactctcgcgggtactgaggtatacgctacaaagcaacgaatcgcaaagtgtcagcctgcgggaagagatggagttcgcctctgcttatatcttcctgctgaagatgcgttttgagaacaacttgcagtttgatatacagatagccaagtctttcgaagactaccgcctccctccgatggcggtacaggtgttgatagagaatgccgtgaagcacaatgaaatcagcgaccgcaaaccactgactatccatatcgtcaccaacaacgagggatatctgtccgtaagcaacgacattcagcccaaacggaccgctgcctccggcaccggcatcggccttgtcaatctcgccaaacgctaccggctattattcaaacaggacatacaaatcacagaggacaaagagttttccgtttgcattcctcttattgatgaagtacaatgaacgacaagccaagtgttatgaaaacagttattattgaagatgaaaaagctgctgtacgcaatctgacttccctgctcaacgaagtgaaaccggaagctgaaattattgccatactggacagcatcaattccaccatcgaatggttcggcatccacccgatgccggaactcgtttttatggatattcacttggcggatggttctgctttcgaaatattcgatcatataagcatcacctgccccattattttcaccacggcttacgacgaatatgccctgcgtgccttcaaagtgaacagtatcgactacctgctgaaacctatcggcaaagaggacatcgaacatgcgtttgaaaaattggacaacttgcaggataccatccccgaaaacggaagcagacgggaaaataaggaagaggaactacttcacctcattcactcgctgaaaaaacaggagaattacaagacgcatttcctcataccgataaaaggcgataagctacttcctgtctcaatcgacatgattcaactgttctatatcaaagattgtcaggtaaaagctgtcttaacggacggggtggaatacaacttttctcttacgctggatgagttggtcgattgtttgaatcctagtctcttcttcagagtcaaccgacagtttctgatttcaagggaggcgatcaaggatatcgatttgtggttcaacagccggttgtccattaatctgcgccactccagaatgacagagaagatattggtaagcaaagcacgggtagcggaatttaaggaatggttttcgagcaaaaagtaaaacaagcgggactatattgaaatcccactatatgcattcgttctttataagtatcggatatcagttctaaaaatggaaaggatgaagcccagcctcatcctttccatttttatcttaatacctaaccttattaaaacccaattgatgatttatacttcagcgtcttctccggtaaggaaatcgaaggaggtacagcctcatcggacaccgcccgtttgtaattcggcttgctgctcatcacaaaacgaagtttcactccatcacggatatcatcatacgtcaggtaggacttatcgtactttttaccattgacataaagctccttcacgtacaggttcttcggcgaccagttgtccgctgtcatttcaatgttttttccattactcatccggaccgtaatagcctctgcgcatggcgaaccgatattataaatattgctggacggagccaccggatagaaaccgatgcagttgaacatataccacgcagacatctgtccgcaatcgtcattaccactcaatgcatccggtgtatttccgtagaaacggtcgacgatggtacgtatccacttctgacatttccacggttctttcaggtagttgtagaggtatgcaacatgatggcaaggttcatttccatgccaataggctccgatacgcccctgtatatcatgtgctccggggatatcatccggcagttctaccgtaaaaagctcatccaggcgtttgcggaacagttccttaccggcctcgttgatatatccctgcacatcttgcggcacataccaggtatattgcatcgtgaatccttccgtgatatcaccccagccatgtaccgatcccggaccctgataggcaaccggagtaaacggagtgcgccagtcacctttgctgtcgcgtccgcgcatatatttcgtttcgggatcaatcaaggtctgataagacaaagcacggttgaggaaataatgataatcgtcttctttgcctaatttcttggctgcctgtgcgatgcaataatcatcataagcatattccagtgtctttgacactgactccgcttccttatcgaatggtacatagcccatttcacgatattccggaaggcaatcgtagttcggattcatcgctgtggttttcatcgcttcgtatgcacgctcgtaatcaaagcctttcacttctttcacgatcatatccgccaatacggatacggcgtgataaccaatcatacaccaggtttcgttgccgtagaaagaccagataggaagcatcttctccacactcttgtcgtaatgagccaacatagaatttgcaatgtccgcattcacctcctgctgaaccaagttaaaccagggatgcaaagcccgataggtatcccaaagagagaacaccgtatagttcgtgaatccttccgctttttctatgttcttgtctagtccgcggaactgcccgtccgaatcctgaaagataaacggatgcagagcggcatgataggcggaagtataaaacgtttcctttgtctttcggtcagcagtcaacgtatattttccaagttccttttcccaaagggcttcccctttcgcccttaactcgttgaaagttaatccgtcgagttccttcatattattccgggcaccgtctgtgctgactgc

SEQ ID NO: 4613 - DNA, 46434 bp, Unknown
  gut microbiota DNA sequence
gagcgtatggttcatatcaatcatgatgaacgcattgtccgactccggataagtaaaacggaacataccgctacgcacaccggaagtcatttcggctttgactccatagtctgccagttccacagcataataattgggggacgcccactccttatcatgtgagtaacgcgaacgatagccttgatcgggatcttcatgagtaccgggttccagtttcatttctcccgttccggggataaacagaaagtcgcccaagtccggaatacctgttccgctcaagtgcgtcaaactgaatcccatcaatgtcagatgattgtatttgtatccggaagctgcatcatagaagcggctgtccgtatcggggcttatctggattcccccgaaaggaatctgtgcaccgggataaacatttccataaccatccgtaccgacaaacgggttcacgtagtccgtcagcttttcagtttgagccatgcccggcaagatactcaccagacacgaccaaaccaaaaacaacctttttctaccaactttattaaccatatccaatcgtatattacacctgtatatcacctacggcaacctgatattcatgccatagttcatctatgctatattccgttcccaagatatgcttgatagctccgtcaaacgaccagggaatcacctccagtgtgctgcggttaaacttacgcaggaattcaggatctttattgtcgcgcaaccagacgaagaaataacctgccgtccgataaccgtccatgtagtttcctcctttcggacgggcattcggtccgtcgaatccgccgttggctacacgtacggcatctgccattccttcaataaatgcccagaatacacgattggttccgtaagagccgatgccttgcggttccagctgataggcgtgtgtcagttcgtgcaacagtaccccacgcgtttcgaagaacagctttgccgtatcgttttccgcaaatgatttctcgatatgccgtgtgctgtagaagatagtaacgtctccattaccaccgcctttggcagaaattccttcgatgtcttccagtgtataatgtatcttgttcaccggagttatgctgtcttccggtgagttataaagagtagccaatacagtgcgtgcctgctctttgatataagactccgcatccggaatgatccggtgataaatgtccgaaccttttgtttccgaagctttatcttcgaacaagacagttcctacattgtagcttttccatacgtccggttttgcttcggcttgcttcttcgcacttgccgcacaagctcccatgcccacaatcagggcaattgcatataccaaatgtctctttttcatattcttttcttgattatttattgatgctgttaattgattccattagttaatgaataaggtttgtcctgcaccgatactccacgacgtttgttgggcgatgccgacattttaaattccaatacgcctcctttcaggatatcctcgtgtgtgatgtacattttatcataagactcgccgttcagtttcagtgactgtacataacgcttcttgtcgctgacgcccggcgctttgatttccagtgtctttccgttgggaagtgtcagcttcagatagggcagatagggagcaccaaggacatactggtctgtacccggacaaaccggatagaagcccatcacagagaaaagataccatgccgacatctgtccgcaatcatcatttccacccagtccgttgatgtcattcttatacatcttgttcaggatttcacgcagccagtactgtgttttccacggttgggaggtccatgcgtacaaataaggtacatgatggctcggttcattgccatgtacgtatccacctaccaggcattcttccgtaatatcctcattatgttcatagtacttctccggcagatgcatggagaagagttcgtccagtttctgtacgaatgtcttttctcctcccatcaggtcgatcataccaaacacatcatgcggtacatgaaaggagaagttccatgaattaccttcgataaagccttcgccgtaagtttgcaacacatcgaactcttttttgaatgtgccgtcactgtagcggggacgggcaaaaccgatgcttgtatcatagatgttacgatagttgagagcacgtttgcggtaagtatccgctatctctttattaccggctttcaaggctgtctgataaatagtccagtcgtcgtatgcatattccaacgtagaggaagctgccgtaccactcttgtccagcgggatatatcccagcttcatataatcggctacaccttcatagtaaggtaccgtagatgtgctaaccatcgccgataatgcctcatccacatttgaaaaaactcctttggttattgcatccgccagcacagacacagcatgataaccgctcatacaccagttctcatttcccatcaggctccatatcggcaacatgccatgcacgctctgctgttcatgtttgatcattgattccaccatatccgcattgcgttccggtttcaccaggttaaggaacggatgttccgcgcgatatgtatcccaaagtgagaatatagtatagttagtgaatcctttcgcctgatgtatgttatgatccagaccacgataggaaccgtctacgtccatatacacggacggattaatcatggtatgataaagcgaagtgtagaacatcgccttctgatccggtgtaccttctatttcgaaatgatccagttcattgttccagtctgtccgtgcagcttccgccaactgttcgaagctctttccggaagcctcggcacgcaggttctttacagcgccttccgtgctgactgccgacaaggctacctttacaaccagttcgggatctttggccgtttcgaagttaaagtaagccacgatctttcgaccagtgatttccgggaaattcttctccagcttgaaacgacgccaaaagccattgtacaataccttttccttatccttatatccgtaatccttgatcggctgtgacaaggaaatggcaaaataggtataattcgtacgtgcccatccgttggtgatgcggtatcctgtcagcaatgtatcgttttccacccgcaggtttgcccacaatactttgccgtcataattatagataccatgcaccaggtccaggatcagatgaccgtcttttcctttcgggaaggtatatttatgtacacccgtccgttgagtagctgtcagttgcgctttaatgccatagtcgtccagcatcacttcgtagtatccgggtgtcgctttctctgtggcatgatcgaagcgcgaacggtaaccctcttccggatggtccgcccgtccgggattcaattttacatcgccgacagcaggcatcagcaatatatctcccaggtcggaatgtcccgtgccgctgaggtgggtgtgactgaaacctacgatggttttatcccgatactggtaaccggcacaatattcatacgcattcttctgataagctccattcacattatgtggaattgtgtctgtgtccggactcagctgtacccatccgaaaggggtgcaagcaccgggaaaagtatgccccataccattggttccgataatcggattaacgtaatctaccggttgctgagctacggcggacaaggttaccgccgccatagtcatcatcaatactttctttttcatcttattcatacctgcttacttgttatcacgagagaaggaataggggaagtcggattcgttaatacctcttcctttattcggtttattatccatatcaaataccagacgtccgcctttcagcaagtcgaaatgattcagataattctttgtatagttcttaccgttatagttcagcgaacggatgtaacgattggcatcactatttttaggagcggagatttccagtttcttgccgttctccagtgtgatcgtcgctttcttgaaataaggagcacccatcacatattcattgctgcccggacataccggatagaagcctaaagcggtaaacacataccaggcagaagtctgtccgttatcctcatcaccacaataaccgtcgggagtggcaaagtagaggcggttcatcacttcacgcagccagtactgggctttccagggctcgcctgcatagttatacaagtaaatcatgtgctggataggctggttgccgtgcgcatagttacccatattggcaatttccatttcacggatttcatgaatcacacctccgtagtagctatcatcaaatatcggtggaaggttgaacacagaatcgagcatactgacaaacatctttctgccgcccatcaaatcggccagtccctgtacatcatgaaatacagaccacgtatagtgccagctgtttccttcggtaaaggcatccccccacttgaacggattaaaaggagtctggaaggcgccatcggcgttcttgccacgcatcagttttgtttcagggtcgaacaggttgcggtagttctggcttctgctcttatagagttccagttcttctgccggacgccctagcttttcacccattcggtagatgcaccagtcatcgtatgcatactctaatgtacgcgccgcattctcgttaatctttacatcgtaaggcacataacccagtttattataatattcgtatccacggcgccctgttgtagaaactctcggatgtacactgttggctcctttgagcaaaccttcatacattttctccgcatccgctttggtcacattcttcataaaagcatctgccactacggaagccgaattgtttccgaccatacagccacgatgtcccggactcgcccattcggggaagaatccgctttcaagatatgtattcaacagtccttcctgcatcttctctcccattgaaggatatatcaaattgacaaacgggaacaggcaacggaacgtatcccagaaaccggtatcggtaaacatatatcccggacggatttcaccgttataagggctgtaatgtaccgtttcacccttcgcattcacttcgtggaacatacgggggaataataccgaacgatacagacaagaatagaaggtacgcatccggttctcatcatcgtcttcgactttgatacgtcccagtacgtcattccaagctttacgtccggcttccttggtctgttcgaatgtcttgtttccgatttctttcagattcagttccgcctgttcggggctgatgaatgaggaagccactttggcatgcacctgctctcctttctttgtcgaaaaaccgatggcagcacctacgtgattggattgcagttcaagatgcgtctctaccaaatggtagtccgcccatactttattaaatgtaaaaggcttgtcgaactctatcacaaagtagttcctgaaattctgcggaacaccgccactgttacgtgtcgtataacctacaatcttattttcttcaggaatcaccttcacatacgaaccacggtcgaaagcatctactaccacataagcatcggacgcttcggggaaagtaaaacggaaatacgcacaacgctccgtcggggcaatctccgttgtcatgttatactctgacagataaacactgtaataataaggagttgctttctctgccttatgcgaaaaccaggaagcacggctgtcctgatcaatcttcagctgtttggtcatcggcataatggagaactgtccgtagtcattgatccagggactgggctggtgggtctgcttgaaacctctgattttgtcagaagcatacgtgtaagcccaaccgtcccccatctttccggtctgcggcatccaaaagttcatcccccaaggcagtgcaatggcaggataggtgtttccgttggagagcgaaatcttggagtcggttcccatcaggggattcacgtaatccaccggctgcttttgcgcaaagatagaggagactcccaacaatagagtcattgtgatagacagtagtttctgtttattcatgatataagagttaaactattaatattagattagcgagtgttattattcacgttacaaattaacgcaatagaaaattaataactatactctaacgtgacaaaaagcacgtccggacgagaatgtcagagtagagaactaggagtcaaacagagcacaaattaaattactaataatcaaataattgcccataagaaaatacaaatagagtacaaacaaaaacaaaagcaagaaagtaatcgagattatgttctgtttactttcttgcttttttcaaagactggttacttcttcattctaaaccaacgctcgcctgtagcacttagcacatacaccatactgtcgttgtcatcataactccaatagaagccgtcttccgaaacacagaaagagaggaatttactgtaatcctgctgtacacggttataatcagccggattattattccatccgaataaatcatatggttcgcccaagctgatgaatatacgaccagtagcattatctgctgtcatagtaaccgcaaagccaatataagatcccataccactccacggacaagcaatcaaattcctcggattacgatcatcaaactccacaccagagtggaagattcccttaaagtctgcatgaatctcatcctgatctactatatgggtcttccaaccatctgcataccatgctgcaatatcagaggccttccgagtatcacatacaacattagcattgtcagtttcaatttcaccattcaaatagttgtaatagagtttatttaaacttattccatctaccgtcacattgctacccaaagtcaacactgcattttcatcattcgttgtatcaattatcatcggatactctgtgtgttttaccacaccgttatctattgcagaaatcttcactttccaattattgctctcgtcgcaaataatcaaatagtgtgcaaggaaagaagaggatgacctacgaaatacaccattattcaactctcccttaagcaaatccatggcctgtgctttattataagcaataatggccaatcgttttctctccttagcttgttgcaaagctgcagttgagaccggagtcaagatcatttctttgccatgcgtctgtcctacagctgtaatttgtgaatcagaataccccgtaatgacaaatgtcgtctccgagttttcgttcaaatattgtagcattcctccattcagcaaggtaagcaacaccgctttttccccctggaaatccagagaataatctgttccaacctcattcttcaacaacgtttcgtctgaatccgatgctacatttccttcttcatcaaactgaaagtagaacgttactccttgataaatcattttccatccgtctgccgcacacagtagttcttttacctctgaaggacgcaagcggtctgcactcatgtcaccttcatgttcccagtctttccaaggttccgtcatgccacaactataaaaaaccaggcaacacaacgacaacattatataaataagtttcttcatgatgtttttcttttaagatttgaaattagaaattaggtatatatcctcccaagtccggtcccactccataattcttggctgctcccggcgcacaaatacgtaagtcaatcatcggcggaatccgtccgtcatccttcactttcatcacaccgtcggtagtacctccccaaggattccgcatcttgaaaagatgagtattatcatccggcaagataaacgtaaacgcatgcccactggtcgtctgccaattttgatctacctgttcaccgcttcttgtaaaaccaccgatcaccagtctaccctgtttgagcgacacttccaccgcgcgttgtaagtcttcggcaatcaatgcatttgcaccgaaacctacactttccccgtcgccggtaaagatagcagaaacatattcagtaccaataccaccgacattagaactaccttgatagatctgattccacttaatcatagccttttcgagaatcgtagcccaagtgacttctttatttctgccgcctaaggcacctaaatcgccactattaccgataaaatagtcgccacctacaccaactgatatttgttttcctttcgggtcatacatagtaactgtgtatgttttgtccatattatccttgataatgtgttttacgaaacggggatagaggtatgccatcgaagcaatcaccgcacaagcacagcagtcacctacccaacgctgatttacatcagacatcacaggatttccatttggataaatggatacaacattgaatgtattccaagccatcttcgtcccaccatctccaaatggttcaggttcttcagcaggatcggcaagccatttcaagtctgctgccgtagcttctctgtcattctcatgctgtctgcccatcggagttatcgcactaaacgtactggaacctttactagcaatcaagtcgttgatattctccgtatatgaacgcatggccaccagtttccattcagctatctgcgtggcagcaccaccattgttcgcttcaacagaaagtctgtagtaacgataggaagttgcattatccacttcatagcttttctcttcttttctcgctgcaaaaagttggtttgtctgcgcatccagttctgtccacgtagtattatcattagaaccatagagtgtccaatctttcgggtccatttcgggagtatcggcagccgaggtcaacgaataggcagtgacagccttactactatttccattccaagtgatgttgaaactactatgataagtaacatacttcgtgtcagcattatcgtctaccaaacgtctgatttccgaaccgacaggagcatcagcatattgcgctataattgtaccactggagggcatattcgtgttacccgaaccaagtacataagaaaccggagcatcttcgttcggaccttctcctccattatctccttcatcatcgtcggacgaacatcctgccagacaaaagggaattagcagcaccaaaagaaaaatgattctcttcactgcattcacatcgctacatcttatttgaggtatcttcattgtttttcttttcattaatttctttcattcattcgcagatcggacatccggagtatattactccgttgtccatcccagattttgtaccatcttcggattacgacgtacatcttcgtcaggaatcgggaagaggtaatgtttaggcaaaaatgtacgtgtttctactactaccttctcaaaaaatgcaggagcatccgaacggaaagccataccatgaataggtccgccttctccacctctatgatatttaggataaatccaatcatcgcctacagccatatcggctactttccaacgacgtacatcaaagaaatgattccattcgaacatcagctcaaccaaacgttcacgatgaatacgtttgtccactccgtcacgtgtatcttcataaggaatgcatgcaaatccattatcgtccttagtacctaccgcaccatatccaggaataccggcacgggcgcgtatcttatttacatacttaatcgcttcattacgttggtcacaagcgctcaacgtttcagcataccccaagtacatgtctgccaaacgaagcaaagttgcacaatgcctgttagccccgctacgtccttcttttgaagccattttacgcataccataacccgtgtaaggggcatcccaattggcattagcataaccggaattaccgttataagtcagttctgtggttatttctccacgcggagtatctgtcttcaaccaagtagaaccatggaatgtaatgttcgtataaaaacgcggttcgcgattagcccattgtttcaatgtttgattcgaattgctcttgaagtaggttctggaaggaactacttcgtcagtatagtcactcgaccatcccaaatattcattagaaggtaccccctcatattccttatagttcgtatcgtcaacaatccggcgaccgtctttcataaagtacaagtccaccatttcctgaggtacaccaaatcccagaccacctctcaaagcaccattattatcatcgtaccccttgtgataaggcgtggtttcgtaagcccggtaatcatggtctgccaagcgaatgaaaatctgttctttattctctgtaccgtacaaaactcccgatgtcacttttctataagattcatagaaatcaatctttccatcggctgtcttctccgtatataaagagaaagtgttaccgtattcatcaaagaattctttgtaagcatcacgtgcagcctcccatttcgctttttcctgcgatttatcttgcggaaagagttgcttgccactttccggattaacgatggcggcataatcgggattacaattgaatagcggacttgccgcatacaacaacattttcgctttgaaagctttacatgcagctctgtctatacgtcccaaattggatccgtcatatctatcaggaagctcatttgccgcatcatcaaattccttcgccataaaagccacacattcatctaccgtattacgttctttcagcagttcagcagtagaaatatccaatggaattggttcttcccccaaaatcacaaatgggccgtaggaacggaaaatcatgaagtaatagaaagcacgcaaagctctggcttgcgctttccactgtttgcgttgtgcggccgaagcttccaaacaacggtctacattcatgataaatgtactggcacgagaaattcctttataatactcgatgtaccaaaagtttatccatgaggaacctgcataggtggctccggaagcccattcgctaccattatttccgtcccatgaaagcttgcattccaacgaaccggttgtccagatccccgacatcgtattccttgcagaacgttctaatgtttcatcgggcacataattatacacattattcaaaaactgttctgtcttcgagcgattagtaaacgtatcctccaagtcatattgttcaccggggattgcatcgaagaaatcattgcacgaactaagtccgaccaccaaacacagcgccaaagttcctattttaaatatatttttcatatccttcttgctaactgattattattaaaaacttacattcacacctactgaataagtacgtacattaggataagcagtaccattattggtattcaactccggatcccataatttgaacttagagaatgtcaataggttggtgcccatcacataaatacgcgcactcttcaggaatgtttgattaatcaacttcttcgggagttggtaagcaatagtcaactgtttcagacgcaggaaactgacatctttctgccaccatgtgctggttttcatattattttgattcgcattgtttccatgatgcaaacgaggatagaatacatcctgattagtcggattgtcagcagaccatctgtcagtaatgtttgcaaacaagttcgtaatacctgaaccatcattaaaaggatacatggcatttcctcccaaacaacggtctgccttggcatttccggcaaagagcgcaccgacagagaaatcacctaattgtaaatctgcaccgaaaccataataaatcttaggtacgtcaccctgacctatcagacatttatcataatcgtcaattactccgtcaccatttaaatccttatatttgatatcacccactttcgaaatctgtcccggatgcccttcaccaaactgcttggcatggtccatgatctcttcttcactagtgaataacccttcggcgatccatccccaacgtccgttcacgttcgttcctcttttttccatccacggatactgtacccggggatcatcgttctctataattttatcttcattccatgagaagttaccacggacagtcaggaaacatttcttaccgagttgctgtgtatattccaatgtagcttcaaaacccttattgtctaccactcccaaattagcataaggcatttctacgaacccggaataatcaggaataacgcgtcgggtaataaagatgtctttacgatgttctttaaagatatctaatgtcagcgaaagattgtctttgaaaaattttaagtcaacacctaagtcttgcttgcgggaagtagaccaaccgacattggctccgtacttgctgaacccccaaccaccaacaccgttattctggtcgccaaaacgataaccatctacgctcgccatctggtctaggtacataaaacgccgtcctgttacagcatccgtaccaactaagccatctgtataacgcactttaaagtaagaaacagtttcttgcaaagattcccaccaagcctcattagagatagcccagccaagaccaaatgcagggaagaaaccgaaacgtttttctggactgaagttctcggaaccattatacccaaggtttgcctcgaaaaaataacggtcgttccatgagtaagtagcacgggcggccaagccttgttgcttatagggcaaagaaccgatcagattatcagaactcgaacggtaaatcttttggttataaagcaaaagaccacctatccgatgcaaaccgaacgaacggtcgtaatttaaagaagcttcaaagtaagtacttctagagtcggaagcgccctggtcaaatgcaagatctttatgtcctgtataggtcagtgcataccgataattgccatctgcatcaaatacatcatcattccacaatccgttttcgtctttagttccggcaaaattgtaagtatcttcacgcttgttatacttcaggtcacgactgttatgcacgtcgaaagccaacatggcagaggcggtaagccctttactccacttccagaaaccaaggtcttgcgtcaaacgaatgttggagttcaactgatttcttgcttcatttttgtaaccacgacgagtcaaatcggcatacgggttacggaggtcaccattggtagagatacctggtacagaaccatcaggcatcattaacggcaaatagaccggattaatctccatagctgacgcaaacaagtcactggtagattgctgcggatagttacccatagaaaggaaaccattgaagcccaaatcaatagtagtcgtttctgttggcttcaagttcaaattagcggtataattgtagcggtcgtaacggatgttagcatcatagttctccatttcagcggtacgtgtcagacctttttcattataataactcaatgaaacgtagtaagtggcattaggtaccccaccacgcacacttacatttacacgacgattatgtccccagtcattgaataattcgttcatccaatcaacgttcggatacaaataaggattgaacatcagtggattatcattcggtagtaatccatgggctttcttcgtagcctcaatatattgaggagaatataacatactgcctctagtatccatatacgcttcattggcagcatccatatacgtaaaggcatccgccatttcaggtttctttgtcaatgtcacaaaaccttcatagtagtctactgagaattgcggcttgcccaccttacccggtttggttttaatcagaattacaccattagcaccgcgtactccatatacagctgtggcagaagcatctttcagcaccgtaaacgactcaatatcttcagggtcgatattattgaaactacgttccacaccatccaccaataccagtggtttagagttctgacccgccagtgtagaaataccacggatccaaagatcggaatcatcatgccccggttctcctgaacgttgcacagctactacacccggcaaacgtccagcaatagcagaagataaattagctgtcggcatctttatatcttctattttcatagatgactgcgcacctactaccgatactttacgttgatgtccgtaagccacaactaccacttcgtccagtgacgatacatcttctgcaagaattacgtccagcactttctgtttgcctacttttacctcttgtgatttatatcctatataggatacgataagaatgggattgttactcgtcagtttcagattatactgaccattggtgtctgttatggtaccattcgtagtacctttttcctgaacgctcactccaatgagcaattcgcctttttcatcagacacacgccctgttacaggagtaccttgtgcccacactactgtactaaatgttagcagtaatgccaatagccacaatgtctttgtgtgatgtttttccatttcaaacaaattcatgttactttgttttttttaattaatactaaggttatcaatcgcctatataattcttataagcggaagcaaattaaaaacttttaatattaagaatattccgcagaagtgacaaaattatgtcaaaatgaaaatgctcatttatagaacagaaaggagaaataaagcacattataaacatctatatatcaacacatagcattcattcacgcacaaacagagcacaagtttgcgcacattgtatcaagttataatagccgccttttcgccacttttattaaaaagtttattcgtaagcagtaataaataaaatctatacagacatgaattcaaatatatctgtcaccccaaacgaccaaagaacagaaggaatgaaggaatcccgaatcattaaccgaaagactttgaaaaactaatttcttatcagtccaaattcattcgttctactgtagtttccctttcgttccactatagttggacgcaagaagcactatagttcctcttgcgcccaactatagtggaacgaataaataaggacctcgaaagacttaattatccggaattactgatctaaggattcgggtaatacatccataaaactcaattagtaaagaataagatagtggggatagcattatcggagttgctcccgataatctttcggcgtcattccgaatcggcgggtaaactctttataaaaataggaacggctggaaataccaacttcagcgataacatcctgaatagaaagttcttcattctgcaacaatcgtgcagccttctccatccgataactctttatcaagtcactgggagccgcattggatatttctttaaacttgcgatagaattgacgcggactcatcgccatacggtcggcaattaaggttgatcccaattcttcctggtcaagattttgttctatcacttgcaacagtttccggataaagtccgcctgttcttctgtagtacaaacaatgcgtccggcccagtcaccaagctcttccatataaatctgctttgcctcccgagtaccgtaaatagctttattgacggcttctttcaaaaatataatatcataaggaagtacaatatatgaatcagcccacataatcaattcgcgctgaatggacgaacttactttccaacttaacattggaataaatgccgttttcgaaagttgagtacgattcttattcacatattccaggaagtcactctctgcttttgcatacatcaacatatcaactagtaacaaagcaggagccgatctacgtatttcttcaaatgcaagttgtacacttttcaccggacaaacaacaaattcatctgctaagagatcacttatcagccataccatttcatccctatcctccagcagaagaaccgttttcttcccatgctcttcagtctccttgatgatagccggttcaaaggctaacgtcaataaatgatccttttctctgtcggcatagtgaagcgtaacatttagctgtctcaaagccgcttgcacagaaaacagtaattggcgggtagttatcgcctcttctgtttccttactatctcttcttccctcttcttccgaaccggaaagttgcttatataattccttcagagtatcatctacagcagagaactgcaacaacatccgtccttcctcttccttcacatccactacaatatccgacttatgttttactccgccaatataaaggtaacaccaatagagcatacagcgtaaagcattcttataaacaggataaacaaagtgttctggtatagcaagttttacagaagatatatcaacgccctgtccttccaacacatgcaagacttctatagagagctctttcatgcacatacaaccagtaatcgcatattccgtagggaaaaatgacttaagttcctctacagccaaagttcccgaacggaaaagagttgcaataaccgtctcgtgtacctgctccataattctgagacgctgttcataagggagattttccgcacgcaactgatcacaagagcgataaatggacgtaaaacgattcagtaactcacgattaagactggcggactccggtagagcttcattgctttctgctgtcaacagccgctgcatcatacgcttctggagaaaatattttcttaataaatgaatcagataaccggctattaatatgaaaaacagcaagtaaatgacataggctaccgtagaaagataccaaggcggaagaatgtacaaagggatagaaaataccttatattccgtattaaatacatctttcttataacggacctttaaaacatagctacccgaaggtatttctagatacgatgcttcatttatactactaaacgaggtccagtctttatcaaatccgtccagcatataggagtactccacatcacctccagtaagaaagtctggaacaacaaaagaaagggaaaaagaagccttcgctcctttaaaacttaacgctttgccaccatcggtataataatcccccagattaacctccttacgtccaatcattagcttacgcaataatatgttcggatagaattccggagctgtcgccacttccttatccagataaagcaaaccgtcaatgcctccaaagaaaagacgtccggtataaggacattgataataggcatcatcactaaactcgcccacctgcacaccggcggcataataataagcatgcgaagaagtgtttttgggattatatttaataagtccacgattagtgccaagccataaaaaaccatttgcatcctccaatatgccatgaatcatatcattaagcaacccttgttctctaccgatataggaggcactgatttgttccttattaaaggtcaaacacactagtcccgatgttgttcctacatacatcctaccatctttagcacgatgcaggctaagtacatcatcaacagatttatgcaatatttctttcaaagaaatgactttatattcttctgtctgtttatcaaatcgaattaaccctttttcccggcttcccaaccaaagaatggaatctccttcagctaacataggataaaacatggttatctctttttgttcataaaagaaatgataacgcttttgcgatttgaggtgaatctccccttgtttcctctccaatatcaatttacgaaatccgaccccagccgtaaccgcatagagtacgctgtcattctcttcatagatatcatgtatttcgataacaggatctgcagacttatcctcaacacaatgcaaggctttatctgcaaaagaataataaaacagtccgggattacccgatcctacccaaaagccatccatataacggctttgttttaatgagtatgcttgaaactctctattccaacgggtataagatgaggcatcctgcctgcctactggagagtaaactgtagtagcagaagcatccataccaccttcataatcatgtacatgcaaaagtccatctcctttcgtaccaaaccataatccgccatatttgtctgtcatgacagaacgtacctgccgacttagattggatgatagtttgctaagcatcagattagtggctatcgagtacttcttagcgtacatgacagctccctgcccatcagaagctacccaaagaatattctgatgaggatcgcggaaaatatcatatatacgtacattacggtccaccacttcttcttcatattttttcgaggtgcgcaaacgtactaaaccattggtttgaaaagcaattataatgtcttcataaaaaggaacaattcccacaactttcccatatcgttgcaccaacgaagaaaggttacgaatatagattttagaccttctggaaatatcatatacataaagatcccgctctgcatccacaaaacagagaatgccattctgataaaatacattatcgataggttttgcatgaaaatcagaagatgaaacagtaggatggacagacaatgtatcccggtcaaagccatctaatgaacattgaatcagactacctgtattccgtggaaaagtccataagacaccatcatccgtgacaaaagcacgctgatccatattctcgacaggagtctctatatttttgagatggacaaactttttatgataagtattataataaaagattccttcatcgcttactacccaagtatctcctttcggattggaatgcagataataatcacctgtaaaatcataatatcccactacctgacgcgaatcttgcgaaaaacgattaactcccaaatgtgtagtaatccacaaacaactgctatctgcctgctgaatagaatgaatgacattgttactcaacgtctttttcattgagaaatcagaacgaaagacctcgatacctttcccatcataacaattcacgccatcataagtgccaaaccacatcagccctgctttatcctgatagaggcaaagcacagcactattagaaagcccttgttgataatcgactttccgaaaaagataagcatctttacccgcatcagcccaacagaccaacgaaccaataaatgtaaaaaggcataatatcagacatcttctcattatattaatagcaagtgttattgttcatgtcttattagataaagcgggaacaaatatactaaatataatataaatgagacattaataagtaagaaaagtaacaaaagccatcggatagaccattagaaagctgatacaaatgtttggcctaaatccaaatattattctacacgcaattcccacaaaaagggaagtacggacgtacgataaagagttggatgaaatagaatcaccatcaaaaaacacgactttacctgatggtgattctatataaaatcaatgatttaactctaagataaattcatcatcttctctcacaatataccccgaactctgcaatggaggtagtaccattagagtttaagacagtcattcgtaccgcatctccccaaaccgtatcgaaacggtggattttcacacgcagaccggtaggagccttaccttcgtaaaggggtttccatgtaccacccgcacggtattccagacggtattcctgcaaacggtcattgttacgatccgtaataaccaccatattgaaagatttctcgcgctcaaaagtaaccgaataccagggcactttcacttcaggattagaattccagcaggtcccgaaatcatcgtcattggcaaagtccatgatagcatagtcactgctccatgtaccttcggcaggctgatatttggcaatgttggaagatataataggagcatccgcttcgggaaccgttgctacacgaccgtcgttcttccacagtttacctatttccttcagagctttcaaggcgttggcatccatcaagccgtctctgttgggagctacgttcaggataaagttacagtaggatttgcccatcgggatgatattatcattgaccatttgtgccggagacttcacaggggtagtcgggaaactttctttccagaaccagttctgctgtaacggcaggcaagacaaggcaggcagacggttggtatctttcgagatatgctgtccggctccttgttcgtaagacttgatgtccgtgtaaaacaaagcctcggcaggatatttcgctgcattcaaatccatcaccagacagttgggctggattgatttgaccagacgataaatatcttcaaaaggtacgtcatcgtaagagatacgtgaccacggggcatcccaaccgtcaatgatcaaagctgttatttcaccatagttggtcaacagttcgcgaagttgctccttgatcatttcgatatgctgcggagttatacacttgggacgcagccgggcatgcgtatcgaggatcgaataatagagcatcactttcatcccttcggcacggaatgcgtcggcatattcttttaccacgtcacgtttgaacgggctgctcattacactataatcggtcgttttagtatcccatatacagaaaccgctatgatgtttcgttgtcagacatccgtaggtcatgttggctgattttgccgcttttgcccattgtttgcagtccatcctgacagggttgaaaagctcgggagcagcatccgggtccggccagtcctcattaaagaaggtcggcatgttgaaatgaatgaacataccacagcgtaaatcaacgaattcctgttgcagctggtgcaacgacttagtttgagcattcaggcataacaccgaagttacacccaggatcatcagtaaaaacagtcttttcatcatctattcatttattaattattaattagttaagtacgttagcatcattagcttatactatcttattcacattcattctcagtctctctgatacttcatccacattccacctttcgaagtggcttccgtatcgggacacaaaagatagatgtagaatttatctcctgcactctgacggtcgtgacgaacaacaaaaagccctttctcattgaaccaggtatctatcaggtctttacagtaggcatttatctcagctacttcagtcgcgttaagagtaccgccgccgcaagtctgtccgctgccggatatgttcttaaacaagacacggtctttatcggaattattcatcaggatgcttgctccttcttcactgctcgggaaagcgaggtttgcaaaccaccatgtccagataacgagcggtctttgcttcgcgcttccactccatccgaaatcatagctcatggcatttatatcggcgattgttccaccggagcttgtagcctgtccgcctgttcccgcccatatttcatcgcaagcggcaccatgatcctgcgcttttccgagtgtgaattttcctccggaagtcacatagtcgaagtcattgaccgctcccttgttggaggtcagggttacatttgacataccgtctaccgccaccgcatcaccggtgcaatcaatggctttgaaggcataagtggctccgttcaccgatttaatctgttctaccggcgtgtccagtttgaagatttgcccttctttcgtcagtttagattcataatattgcgtatggccgttcgcatcgcttccatccttgttttcaatcgttattaccttgacagaaagatcattgacaccattcagtaccaagccataataaccgataaaattgccggaagcgtcacagatggactgattatccaataagtttttctcaaagagttcggtaaagtccgcttttgaagcaactttaccatcgatgtatgcctgtgtagtcggctgcagttcaatggtattgccggtagattcaccgtataagttcagttgtggcgcctctccttctgccggaatctctgatacgacaaacttggtatctgcaaattcactacccaggttttgcagatggacatcgcaattctcaatatccagtgccacttccttgcctttggcagagaatgatgtttttccttctaccgccatctccagaaagtccgaatccagtgtcactgttccgtcttcatgaaactggaagtaaaactcgtgcccctgatagtcagctttccaacagccatcagctgtgccatacaatatttctttaacggaggaagccttcagacggtcaccatctccgtagcccacgtcattcaaatccaaggtattgcaactccaaaagctcgtgcacagcacagctaatgcaaataatactttcttcatcatagttgttttttaaaggttgctctattagttattttgcaggaacacttccacctctgtcttgtattcgttccagagttcttccatcgtaaggtccgggtagctctccttcaggatatacttcaccgcatcctccaggctccactggttggtcagttcgtccatcagcaccgtccacggcaacatacgtacgaagtcgccattataaagacgcagccaactcataaaagcaccggaagtattatagtcaacctgccagacaaagtatttatcactctgcggattccggtaagacttggcgatagcagcctgatattcttctttttgcgtagccagaatatatcctttgctcgctactttcacagcgtccggccatccttcctgatatccctgccggtcacaatcctgcacaccttccatgatatattttccttgtttgggcatccactgcacgcagtgtcccatctcgtgcataaacacatgctgcatgtccggcagtttccaccacgcatcgttcggattgctttccgaagccggataaacaatacctcttccttcgttatgggtggggtaatctatcgcatacgctcctccggtctggtctttcttgataaagacacgcagtttgctgtaagggtcgaaagccagattataggggtcgaatgacatagccgcacaatccatataataccatttccggaactcttcctgagtagcagcctcatctccgttacctatcagattatacaatgcagaaacgggacgtatctccgaatcactctcaaaggaaatctgaacttgtgtcgcctggctggttttaaaatactgccaggcagcatagttcatatccacttgaagttcatacttatccgcctgatcgctcagattcgtccagtcacttgtctgccgggcaccgtcggcatctttgtagatagaacggaaacgaagttcctctacaccgtaacggtctgtaaccactactgtacgatatttactcagacgcagagtggtcggctcgttgccataatcccgccttttcacagtcaggttgccaaaatcaccgacattcgggatcatgacgcgctttatctttttgccggagagcagggagttgaattctacttccactcccacatattcatctctcttttcccagccagagttactgccgtcccacgtgaggtaaagttcattcagcacctcatcatatttcgcctctttgagaggggcagccgcatatccggctacggtattcccgtctttcagtacaggctgataatctttatagatgtcaggagttgcgaagctgtcttcctcaccgtagcaggcagccagtgtcagtgagacaaacaacccgaaagctatatctttccaatgtttcataatcttcttgtttaagcgttattgttcgaatatcgtattaccatcctaagttttgtaccagtgacgggatacgacggaggtcatcataaggtatcggcatgaaatattgctttttcgtaaatgctacacgagtctcaaaagaggtcctttcgaagaatgccggataatccttgtccatattcataccgtatactttgcctccttcgcctccggtgtgatatgccggatagatccaatgttcgggatcattctgtccttccgccactttccagcgacgcacatcgaaatagcggttccattcgaagactagttcaaccaaacgttcgcggcggatacggttcagcagatcggtctgtgtcttcggacaggttattttgccggctgttgcggtaaatgtatattcggggatgcctgcacggacacggattttattcagataagtcagggcattgtcgagatcgctgcacatacaaagtgcttcggcatatcccaaatatatatctgccagacgaagtaccggagagaagtgtttcgagccgttgttgttagaagctttcgcaccccgacggatcaagtatcccgaatccggacagtcgccggaggctttggacttgccgcaggttccgtttgcaccgttggtgaagtctgtgcgcatttcctcattgtacttaccttcgttcagccagatagagccgctataggtaatattcacataaaagcgcggttcacggtctttccactgtttcagcactttggacttatcggcgtcaaagtaaagacgggaagggttattggggtcataatatcttccggatgtgaagttgttggcgctcggtatgccctcgaatttgtcatagccgggatcttcttcgatggtcagtccgtctttcgtaaagaacaggtctaccgtttcctgtgttgtataatagccaccgccgccagtcacatcggtatcctggaagtcggtaaacttagggcatacccagtaggtatagtcgtacaaatctctcagtttcacaaaaatcagttcatcaacagcttcccaggttgtggtgaaaaactcgcccgcagccctgcacgaagcataagggtctagttttccattcgtatagacctcggtcagcttgtatccctgtccggttgcgaaggtcataaaccgttcatatgcatcgcgtgcctgagcccatttggagttatcttcggtctgagggaaaagttgtttgccgtctttattcttgactgacgcctgatccgtatttccgttgaaaagcggacttgcccaatagaggtacagctttgccttgagtgccatacaagtggcgacatccatacgtcccaggtttgcctttccggctctctggagcaaatcgccggaatcaatggcgctctgcaattccgtagcaatgaagtttacgcattcatctaccgaattacgttctttaatcagttcttccaaggaagcgtccaaaggaatgggatcttcgccaatcaacggaatgggaccgtaaaggcgcagcaattcaaaataatagtatgcccgcaatgcacgtgcttccgatttccactttccacgtgtagaggcggcggcttctgtacatttatctacgttctggatgaacgtacttgctttggctattgcctgatagtactttgaaaagtattcacttgcctgagctgaagcggagttaaaggagccgttggtccattccgcatacgttttgttccagcggtttgctccgtccaacgatgcttccgtaaagatacctccgtaggtgttcggatgaatggcatctgtcacttcacgcacgtagctgtatacattgttcagatattcttccgtcctttgcttggaggcaaacgtttcgtccagtccaaactgcacaccgggaatcggttcaaagaaatcactgcaagcagtcagtccgacacacatcgatgcagccaacaggtattgttttattctattcttcataacgattatttgactttagggttaaaaactaaacttgactccgaccgaatagctggatacattcggataagctgttccattacttgagttcagctccggatcccacagcttgaagttagagaaggtaagcagattcgtacccatgaggtagacgcttgcacttttgaggaaacatctgtccagcagctttttcggtatattataggatatgttcagttgcttcagacgcaggaagctgacgtctttcacccaccacgaacttttctgaacattattcgtgttggcgtcactgccgacatacatgcgcggatagaacacatcttgattggtcggatcgtcgggactccagcggtcgtggatgttggcaaagacattgtcacggccttcgtcatcccagaaaggcttgatacaaatgccgtccagatagcggtcggcctgtccggttccctgaaacagggcgctgatagaaaagtctccgatctgtaggtcagcaccgaatccgtaatagattctggggacatcaccgcgtccgatgacggtcttgtcatagttgtcgatcaccccgtctccgttcaagtcacggtatttgatatcgcctacatgtactgtcccgaactgggtagcatggtcttcaatctccgcctgactggtaaagagcccatcggctatgaatccccaagtcgcatttacattcgtaccgcgtgtctccatccaaggatagtctaccggcggttcgtcgttctctataatcttgtctttattgaaagtcagattgccacgtaccgtaaggaatgtcttcttacccagccgttgtgtatagtccatcgccagctctatacctttattttctacgacacccagattagcataagggttttcgatccatccggcgtagctggggattgtactgcgttgcaggaagatgttgtcgcgacgttccttgaaaaagtcgactacaaaggacagattatcattcaggaacttgatatcgatacccaagtcttgctttctggatttagaccaagtgacattcacaccatacttttcttctccataaccgttggcacttgtataattggttccgaacatggttcctgtcagaccggtgaacaccccctgatacatgaagcgtctgcctgttgcggtatcactgccgacccatccgtccgtatagcggaatttgaggaaggaaatgtatttgcggaccggattccagaaagattcattggagactgcccatcccagaccaaaagcagggaagacaccataacgcttgcccggactgaagttctccgaaccattgataccgagattgaattctgcgaagtaacggtcgttccatgaataagtagcacgtccggcaaaaccgcgttgcttgtaaggcataccgccaatgacatccgtcgcattcaaatcccaatatactttctgattgtaaagcaacagacctcctacccgatgagcaccgaaactacgatcatagttcaaggatgcttctgtatacaccgtgcggctgctccattgctccggtgtctgaagtgacaggctaccatccgcttctttcagcaccgagtagaggtaatcgcctgtttcttcatcaaacaaggtgtcttctatccagattccgttttcatccgttttaccggcaaaggtgtacatcggttcattccggttatactttctcttacgtgaattgtaagtatcgaaagctaccatggcagaagcggaaagtcctttgctccacttccagaaatccaagtcctgcttcacgcggatattagaatttaactggctggaaaattcatcataataacctccgcgagccagcagaccgtaagggttgaacttttgctgtgagttgataccggacacggtaccgttgggcagcaacaaaggataaataaccggattcacatccatacaggctgcgtacagcgaactggtgctgctctgcggatagtgtccctgtcccagataaccggaaaaacccagatcaaccgtcgtcttggaagtcggcttcagattcaggttggaggtgaagttataacggtcatacttcatctgagtattgtagttctccagcttgaagttgcgggtcataccggtttctccgtagtaactcaatgaagcataatagtttgcattaggtacaccaccacggatattaatattcccgcgacggttgtgtccccagtcattgaacaggttatctgcccagtcgatggccggatacaggtaaggattatacaatcggggattgtcattcggcaataaaccgttggccttctttgtcgcttcaatataagcagccgaatatttaagtgtaccgcttgtattcatctgcgcctcgttgcgtgcatccatgtaagtgtaggcatctgccatatctactttcttggtcaggcgggtaaaactttcgtaatagtccacactaaactgcggtttgcctactttaccgggtttggttttcacaatcacgactccgttggcaccacgtacaccatatactgcagttgcggaagcgtctttcagcactgtaaacgattcgatatcttcagggtcgatattgttgaaactacgttctaccccatcaacgagcacaaggggactggaactctgtccgagcaaggaagataaaccacgaatccagatatccgattcatcgtgaccgggttcgccgctacgctgaacggcaaccaccccggcaatgcgtccggaaatagcagaagacagacttgcagcaggcatcttaatgtctttcacatccatcgtagactgagcgcctaccacggatactttacgctgattgccgtaacccactactaccacttcatccagtgacgacacatcttccaccaaaacgacatctacgattttttgctttgctacctttacctcttgcggcttatatcctatataagatatgagcagaataggattccctgttgaaagcttcaaggtatactgaccattcatatcggtaatggtaccattcgttgtacctttttcctgaacactcacccctatgagcagttctcctttttcatcagagacacggcctgtgacggaacttccttgcgcccatactgttacactacacgtaagtaacaatagcagtagccataatgacctgatgcgatgttttttcattccaaacaaattcatactacttgtttttaattaataataataaggttaccaaatacgtttaatacgttgacgcaaattaaaggaataaccaaagaaatgagatactcctgtgcgccaaaaaacagagaagagaaaaaatgtctgtttaaagtacagatggtaaaatagagtactggataataccctatatatcagaataataaataatggaaaacaaaagagagtacaaaggagaccaaccttaaaaagcagcacagatcagcatgggaatttatttcttggcaactaataccagaccgcttcctggctgttcactcctgatttttatgagtgtcattccctaaaagcttctctctatataccttaggagttacgccaaacttacgggtaaactctttgtagaagtaagcacgactggatatacctacatcggaaattacatcctgaatagacagttcctcgttctgcaacaaacgggcggccttctccatccggtaatctttaatcaaatcgctgggtgacatacccgaaatctccttaaacttccggtagaactgacgggaactcatcaacatttgttctgccacaaacgtggagcccaaatcttcacgatccagattctgctccatgacctgcaagaacttcctgacaaaatccgcctgctccgtagtggtacaaacaatagaatctgcccagccttccaggtcttccatataaatctgtctggcttcccgcttgccataaatcactttatggatcgtttctttcaggaatggtatatcataaggaagaacaatataagaatctgcccatagaatcaactcccgctgcatagacgcactgactttccatgtcaacatcggaataaacgctgtcctcgacaacatagaacgattcttattgacatactttataaaagtactttccgcatcggcatacataagcatatccaccagaaataaagtcggtgcggacttatgcatctcgtcaaatgccaactgcacactccgcactgaacggacttcatactcatcggaaagtaacgcactgatcaaccagacgatctcttccctgtcttccaacaacaaaactgtttttctcacttcattctgctctgccacaacaaccggatcaaatgtgatagtcaactgattatcctgccctacaggggttatatagcgcatcacactattctgctgcttcaatgcagaaaacacgaaacgttgcatggtccgtatcctgaacatatcatccgaatctttcgccctgatagacaagagttcttctccggacaatacatccttcaatcctttcactgtttcatccggagaaacaaatgtcagcatcatacaacctgcttcttctgtcaccgtcaccgataccttctctgtcttacaactggaaatataaaggtaactgaaataaaggatacaacgtaacgcattcttataggcgggataagtgaaattttccggaatgtctaactgtatcgaagagacatcatggccttctttttcaagtacttgaagcacctcttccgccatcttcaaaagagacaaacgccccgaaaccgaaaaatgcagcgacgacaacaaacggaaacattcatcacccaacccacacccaaagagcaaggacatcacggattcacgaatctgacctattttctctgcatgtccttcagaggagatattcttgtcgtttagctgatcacaagcctgataaatgagagtacaagtattgagcacctcacgcgcctgataactatccgccgccagagatatatttcgattttccgactccagcagtttcttcatcatccgttcatgacgaaaatacttgcggaaaagatgaatcacatacattaccaatacgatacccaatagtatataaacaatgtacgcatacactgtgcgataccaagggggcagaatgtgtacgggaatcgtgaaggtcttgtattctgtagcaaacacatctttcttatagcgaaccttaaacagataatctccggacgggacgctgaaataggatgcttcattcacactgctgaaagctccccagtccttatcataaccttcgagcatatacgagtattccacatcgccaccactggcataatcaggtacaacaaagaataaagaaaacgaaagattggctccctgcatccgcagccctttcctgtccggcaaataatggtcttgcaaattgacaaatgtcttttctatgatcagcttacgcaataatatttccggataatattccggtgctgccgacaccttcttatcaaggtagagcaatccgtcgattcctccgaagaaaagacaaccggtatatggacaacggtaatatgcatcatcgctaaactctcctatctgaatgcctccgctgtaataataggcatgagaaaatgaattttccggattgaatttgatcagtccgcgattcgtacccagccacagcagcccgttggcatcttccagaatactatgaatcatgtcattaagcaacccttgttcacgaccgatataatccgcttccagtttgcgttctttaaaagtaacgcgcaccaagccggaggtagtgcccacatacaattgctctccatgccagtgcaaacagagaatatcgtcaacagatttatgcagaatctcattcagggaatagatctgatactcttccgttttccggtcaaaacgtatcaatcccttttgcctgcttcccagccacaacagggaatctccttgtggcaccatactataaaagaggttaagctcttgttgctcatggtaaaaacgataattcttccacgatttgatttgaacgtcctgcttactgttatctactattactttataaaaacctttacccgaagtcgccagataaaggacactgtcactttcctcaaagatggaatgcacttctgccacttctcctccagttcctgtttccctatttgaaagttcatgcaactttccattatcaaaagaataatagcacaagcccgaagagccggttccaacccagaatccattcctataacggctctccaacatggagtatacctgaaattccctgttctgcttgacatacgacatcgcattctgctttttatccagcgagtaaacctctgtgttggatgcgtgtaccccgtcccgatagtttttcacatgcagcagcccgtctccctttgttccaaaccaaagtcccccgtatttgtcggtcattatcgaccttacctgacgggtcaaattaggtgagaaactgtttaacatcagattagtggcaatagaatacttcttggaatacataatggctccttgcccgtcggtttctacccacagtaccccttgccgggagtcattataaataccatagatacgcatattctgatcgataatctcctctgcatacttttgagaaagacgcaagcgaatcagaccattcgtctggaatgcgataacaatatcctcatagaaaggtacaattcccgttatttgcccatatttatgaaccatctcaccaatgttacggatgtaaatcttagactttcttgatatatcatacacaaaaagatcataatccgaatcatagaaacagaatacaccattctgatagcagacatactgtatctgcttggagtgaaaatgtgagggagtagtagtgagacgcgtagacaaggtatcctgatcgaaagagtttaaagagaaacgatacaggtcaccgctttcataagggaaaaggtataattcaccttcgtcggtaacaaacgcgcgaacatctactttcagcattttaatatcgggcatcggaatccgcacaaaacggcgatggtgggtattgtaataggcaatccagtcataactcaacgcccatgtattacctgcatggttggaatgaatcacgaaatcagtgtcaaattcgtaattgcagattacctgccgtgaatccttcgaaaaacgattggctcccaaatgtgtagttatccataagcaactgctgtctgcctgctgaatagaatgaataatgttattgctcagcgtcttttgttccgaaaagtctgaacgaaacacttccatacttttcccatcgtaacaatttaccccatcataggtaccaaaccacatcaatccctcattatcctgaaaaagacaaagtacagcgctattggacaatccctgctggtagtccaccttttggaaaagataggcatcctttacattgtcagctatgctaatcaatggacaaatcaatgtgataaaaactagaatcaggcgtattctcatagcattttggaaagtaatcagataataatatgcacaaaggtatattttcggtagcaaattaccaaaagtttttttcgccttcagcggttacaaacctcacattaacaaataggtatctcagaaagacatgaaaaaagggaggactcgtttattagtcctccctctctttattatgcttaaaacaaattgtgctgttacttggctagttcattgattacatccataatcttctgaccgatctcttcagcagcttccatagtcgaagcctcgctgtacacacggatgatcgcttccgtgttgctcttgcgcaggtgcacccacttatcagcaaagtctatcttcacaccgtcgatgtcattgatttcttcgttcttatagatttcctttactttagccaggatagcatccacatcgatttccggtgtcaggtctacccggttcttggcaatgaaataaggaggataagtagcacgaagctcgctcaccttctttccttcgtgagccagatggctgaggaataaagcgatacctaccaaggcgtcacgtccgtaatggctggcaggatagatcactccaccgtttccttcaccaccaattacagcattagttgctttcatcttggtgactacatttacttctcctacagcagaggcgctatattccataccgtatttgcgggttacatcacgcaaagcacgggtagaactcagattagaaaccgtattgcccggagtatgcttcaatacataatcggctacagtaaccaatgtatattcttcaccgtacatgacaccgttctcgcagatcatagccagacggtcaacatccgggtctacaacgaatgcaacatccgcttttccacctttcatcaggttcatgatgtcacccaggtttttttcaagtggttcggggttatgctggaagtttccggtaggttcacaatagagtttctctacatgtttcacacccagacgttccaggagttccggaaggataatacctcctacagagtttacacagtcgatagctacacggaaattcgctttcttgatagcttccacatctaccagttcgagagccagtacgctgtcgatatgtttttgattataagtcaggtctttgcggtaagatcccaagtggtctacatcggcatagtcgaattcctcagcctcagcaatacgaagtacttcgttgccttcttccgcattcaggaattctccatgttcattgagtagtttcagtgcgttccactgtttggggttgtgagaagctgtcaggatgataccgccacaggcgccttccatcgtcacagccagctcggtagtcggggtagaagccagatcgatgtctacaacatcccagcccattcccatcagtgtgccgacaactacgttttttaccatttcacctgagatgcgggcgtcgcgtcccactacaattttgttgctttgtgccttacaggtcttacgaatcaaagtagcataagccgaggtgaattttacaatgtcaagcggatttagtccctcacccgctcctccgccaatagttccgcggattccagagatagatttgattagagtcataggtcttttaactaagatttatatgggggttaattcagtgctttgctgaatgtccaaatatcataatagtatggattgacgtattgttgtgctgatgaatgtcctaccttggaaggaacgatcaaacgtacgtgagcgtagttgcgcacaaaaggtagtgcaagcagccagcctgcaggtactgctgttgactgataataacttgcccagtaatagtccatttgtatgaaagtaccgtacacatagctgccttcggctacataacggaatacagcgggattcgtgtaaagctgatttgcatctccccactcttcgaggaagacattgaaacaggtagtgtcgcgtgtcattatatcttcttcgatataacggacgcagatttcattgttgttagcgaaagtatccgttttgttctcggcacttccacgatctacaatctgcatatatacaccatcggagagggcaacgtattcgttccggatcaaatcggtgacagtatcattcttctcaaattcgtcctgtgaaatgatctggattcttttatctttgatgaatttattcaccgcattcttttcgtcctccaacatttcagcgtaagtctttgaatcgtcgcacgcctggaatatacctccggctgccaacaaagagagaaataaaaatacaagtttcttcattatctgttatttagctatattctgcacaaatgtatctcaaattcattgaaagatgaaaggggaaagttgaaagttggtaacttttaacctttctctgtctacttttaaccttccattcttagcttttggctgtcaacaaaggtttatatttctccagtgcctgttcgaaaacggctttcgcctcctctatcgttccgaaaaattcaccgcccgaagcattcagatgaccgcctccgttaaaaaattcggctgcaagctgattgcatgggaaagtaccgaccgaacggagcgaaatcttaatcattggcttttccgtatcttcccgcaagaaacaggagaaacatacgttcttaatggtaaggggaatattcacaaacccttcgctgtcaccttttatatagtcaaacttactttgttcttcctttgtcagcgatatcaatgcggcattgtaatctgagtaaaccaccatatttgacaacacataccccatcagacgcaggcggctctctgaatatgtattgtatactttacggtagatatcatctttatcaatccctttggaaaggagttcgctgatgataaaataaatctcgcgattgttggaattgtaggtaaagccacctgtatccgtcatcataccggtatagatacattctgctccttcctttgaaatatcactgaagtagcccatacgacaaatcagacggaatatcagttcggaagtggaagatatcttaggataagacatggtaatcttacagaattcttcgggataaagatgatggtcgatcatcactttgcgtgccggagaagctgccacggcatccgccatctcatcaatacgctttaaggcattaaagtccagacagcaaatcacatcagcttcggcaatcaatttgtccgcaaagtccttatagcggtcatacaaaaggatatccttgctgcccggcatccagcggaggaaatcggggaaagcgttaggaacaattacatttactgtcttctcctgtgaatccaggaagtgataaagccccagtgaagagccgatagcatcgccgtcgggcgacacgtgagaaacgattactattttgtcagcgcgctcaaaccacttggtaaagtggtcgatttttgcctgttctattactttagtcaacataccatattctttttcgagttgcaaatgtacgataattcttcgtacttagagcaaaaaccgcacagaaccttcttcagacagagtgataaaatgcagatgcagtctcttacattcctcccggaagaactgtttgcgatcatcggaaagggaagcatccaacaggatacaagatggagaaaagagtccggtaagttcttccagacgaccgttatagcctttgcataagtacatataattaataaataacggtgaagcggcagatttgttccgccatcgattatcggtcaccatacaaatacggtagccatgataaaatacaatctgctgatgacgacagaagtcaacgttctgacaatcagccgttacttctattggaggcagaagttgatgacgtctccaataattagccgctacagcctgcaaacggcgcttatcagaaagggtatcggcatagttcagccaagaagtcccatcctcagcaatacaatgaatcgccggacaaccacggacattgtaaaatacaaggctcggacaaggacggtcataccagcgcatgaccgtgtgataaatgcccagacacaacaggcaggaaaagcaaacaacaagattcctgaaccttcgggtcttcaaataataaagaaaaagcaacaagaaaatgtagatgcccaacacctccagacgataaagccagataccatccaaggaagcataaggaagttgctcaacccaccggacaaaatcattcaacactttcaacaggaatctgactgctcccgccataacaaactgaacggcaggcagtggagtcagaagaagcataagaacggcagcatacaaagttacagtcaccaaaggtatgactactaaattagtcagcagaaaatgagtggagaaacgggagaaatacagcattacaagcggagcagttcctatttgcgcagctatcgatacactcatcaatccccaaacatattttcctatcctgctcttcacaggcaacaactgatagaccggtttctgaatcatcaaaatagaaagtacagctagaaaagataattgaaaaccaacatcgaacaaccaagccggattgaccaacagcattacccatgcggtagcagccagtgtattcagagtcaatgattggcgtccgaacagttccgctattgccaaaaccgagaacatacttaccgaacggacgacagacggtgacagaccggtaaaaaaggcaaaagaccataataaaacaaggagcagaacggaacggaaatatcgccctgcctgccacttccttgctagaggtttcaaaaggaggaaaagcaaagcatacaaaagccctatatgcaggccggatagagccaagacatgactggcaccggatactgaataactttcacggatagagtcacttaaatcggtcttctcacccacggtcaacgctgaaagcacagccagttcatctccttcaaatcccagcttccgataaaggtttatcaccttttcctgacaaaacatcgcagtatacctgatagatggtgaccataacgcccatttcccggatgctacgtaccccgttccactaatgccatgacgcatcaaatagcgggcatagtcaaactcatcaaagtttcctccgttagcgggtggagcaatgcgggcagataccagcagttcatctcctatctttaattgtttatcccccagtttcaataaagtaaacaatgaatctttctgcaaataaagaatagcctttcgccctatcggacatacccctgacgaatctcgcagctctttaagcaataccctacagagcaacgtccgttctttagtctccggagtatccgttagtcgtacccgataaaccgcttccttctccggaaagtcatataccgtttgttttaattgacaagtaatgcctagccacccgcctgcgaaacaaagcacaaagacagatattccaaaacaccaccgaagtgaacgccgtttcagaaaatagagggcaatgcacagtccggcaaagagaccaaagttcagaatactccaaaacagttccgtcgattgatcaaagaagcaatctccacaaaaaacgcctgctatccacgggataatcaggcgtatataaggatactgatgtaaagaggcagtattcaatgtgtccgttacaacttgtgtaactggcggatcatctcttccgggtccggtgctccgaagacagcattgccggctaccagcacatccgctcctgcttccaccagtcgggcacccgtttccaaattcacacctccatccacttcaatcaatgcttttgaaccggtccgttctattaaagcacgcaattcacggactttctctacagaatgctcaatgaacttctgcccgccaaaacccggattcacactcatgataagtaccatatacacatcctgaatgatatcctgcaataaagcaacaggagttgccggattgattgtcactgccggctgcattccagcttctttgatttgctgaatcacccgatgaagatgcgtacaagcctcatagtgaacattcatcgtatgtgcgcccaacgctttcacttcagggataaacttctccggattgactatcatcagatgtacatccaacggtttgtccgtcaactttgctacatacttcaacaccgggaagccgaatgaaatattaggaacaaatactccatccattatatcaatatgtacccactccgcttcgctgcggtttatcatttcaatatctctcgccagataaccaaagtcggcagaaaggatggaaggagaaataatcggtttcatcattctattgttttaagttctaagttagcttgaccgtggtcagttcattctatcaattcattttatatccatccgacaagcggaatccacgaagcaattcatcggtcttcagacgtttcttgccgggaagctgcaaagagaggacagaaacaaatccatcgggcacagccacctttatatatttcttgccatccgtcacaactgttccgacaggcaactgatgtgcctcataaatcttctcgctctcaaaaatcttcatcaccaccgcttctccttccggactgaccaactcactccatgcagcaggataaggcgacagaccacgaatgaaatcatacacctttttcaccggagaattccagtcaatccggcaagtctccttaaatatcttcggagcgggacgtagttcgcccaccactgccatatcttcctgagcaattggtttcaccgtatcattcaagatcgcatccacggtttcgagcaccagcttaccaccgaggatcatcagtttatcgtgcaccacttccacattatccgtgtcggcaatggggacacgtacttgctgaatcacttttccggtatcaatctcgtgttgcaggaagaaggtagtgataccagtctccgtatcgccgttgataaccgcccaattgataggagcagcaccccgatactgaggaagcaacgaagcgtgcaagttgaaagtacccaaccgcggcatattccagaccacctccggcaacatacgaaaagcaaccacaatctgaagatcagctttccactcacgaagtgcctgcacaaaagcctcatccttcagtttctccggttgcagcaacggcaagttctgttcgagtgcatattgcttgacaggagaatattgaattttgtgtccgcgtccggccggtttatcgggcatcgttatcacgcctaccacgttataaccaccctctaccaactgacgcagggcctccaccgcaaaatcgggagtacccatataaacgatccttaaatcttctttcttcataatcttcttattatcttcgtagaagttatctgcatagtaacctggctccggcaccttgccggttaatcttcagaaaaatgtaccagtacttggcggtatgagttaaatatctttgatttggagacaaatccctgatatcgtccttcttcgtccactaccggcagattccatgctttggtatcatcaaacgtctgcatcacttgttccattccatccgtatcgaatatcttggcaggagcagatgtcattaatttattaacagtaaaacggtgataaagttcttgccggaacatgatgttgcggatatcgtcgagcaggacaattcccaacaattcgccggtctttttatccgtcaccggaaacatattacggtgggaagcggcaatggcttttaccaactctcccaagtccatttccggatgcacggctacaaaatctttctccaccacattctccatcttcatcaaggtcagcactgccttatccttatgatgtgtgaggagttgaccgcgcttggcaagacgcatggagtaaatactatgaggctcgaaagctataatcgttaaataagaactgacagacacaatcatcaacggcaggaacaaatcgtaacctccggtcagctcggctatcaggaacactcctgtcaacggagcgtgcataaccccactcataacacccgccattcccatcaaggcgaaattcttttcgggcagataggcggaaaaggcaaagtcattgctgaaatgagaaaacacgaatccggcaatacaccctagataaagcgaaggagcgaaaataccaccacacccgccgccaccgttcgtcgcactggaagcaaacactttcagcaagataatcagcatcagataaacctgcaacagattaccatagccgtagaacatagagttgttcataaccgtgtcccattccgctgccgaagttccgttcagcagaagttcgattgtatcatagccttcaccgtagagcggaggaaaaaggaaaatcagcacactcagcatcacaccgccaaaagcaagtttctgataagggttcttgagttttccgaataccccttcaatggagttcatcgcccgtgtgaagtagagagaaatcagtccgcagaagattcccagcaagatcacgtaagggatacgttccagttcgaaagcctggtcgaggttgaacttgaacatagcctccgttccggttgtgatataggaaacagttgccgcagtcacggcggaaatcagcaaaggaagtagagaagacatcgtaaggtcgatcatcagcacttccagcgtaaataccagtccggcaatcggggccttaaagattcccgcaatcgcccctgccgcgccacagccgacgagcagcatcagcgtgcggtgttccatcttgaaaacacttcccagattggagccgatggccgaacccgtcagcacaatcggtgcctccgctccaaccgatccaccgaagccgatcgtgatggcactggcaattgtagacgaccagatattatgtcgtttgatacgcccctgacgacgcgaaatcgcatacaggatcttggtaacaccatgactgatgtcatccttcacgatattacgcacaaaccatcccgccaggaaaataccgatcaccggatataccaaatacaaatagttggccgatgtcgcattaaagttgtttgtcagaaaattctgtatctgatgaataaggaacttcaaaaataaagcggcaatcgcagtgaagatcccgaccagaaagctcaatatcaggataaactgcttttccttaatattagcttcccgccatttgatgcaacgctgtagtaaactctgtctctcctctcttttcatctattcacgaattatcttgatcactccgcctttatctaactttataatacttgagggcttgggacggctcatatcatcctgtcggaagccgactatatagtccactgccgacttgacttcttcgctgatctcagtaaagttggccgctcccggctgtccgctgatattggcagaagtggaaacaatggctttacgaaattgctgacaaagtcgtctggagaattcttcattggtcacccggatacccacgctgccatcttccgccagcaggttcggagccaaattccgtgcaccggaataaataatagtcaatggtttatcggctacttctatcaggtcccatgccacatcggggacatcctgtacataaaaatccaccttcacaggagagtctaccagtaccagcatagccttgctatcggcacgtttttttatctcatacacccggtgtacagcctcttcgttagtagcgtcgcagcctatgccccatacagtatcggtaggataaaggatgacacctccttcattcatcacctgacaggcttttttaatatcttctatcatttcttgaactatttctgttgagaataacacgcaaaagtagtacttttgcgtcgaaataaaaaagattaagggaaaacaatggaagaaatcgtatttcatcatgcactgcctatccagttgcgcttcaacgacgtagataaattcggtcacgtcaacaacactgtctacttttctttctatgacttagggaagactgaatatttcgcctccgtatgtccgggagtggactgggaaaagatcggtatagtggtcgttcatatcgaagccaattttgtaaagcagattttcgcatccgatcatattgccgtacaaaccgccgtttctgaaattggaaccaaaagctttcatctcatccaacgggtgatcgacacggaaaccctagaggtgaaatgtatctgcaaatcgatcatggtaactttcgacctggaaaaacatgagtcgatgccgctaaccgaagactggatagaggcaatctgcaaattcgaagggaaggacgtacgcaagaagaaaaactgaaagaaataagccttccccggtgccaggaccattcctcatcgctgcctgacttcggagagccaaaacctgagcgataagaaaagttttatactgaatcatgtccgctatataatagaaattacttgcttatacattatattatatataattcctctctccaaaagtgaacagcaaccatgtgaatactctcttaatgaacataaaggaagtttgccactttacgctctccttgatgatcatagtttctgttatcacagggaaagttcacaattccctcttccggtgcaccggacagccataaggcggtagaacctcctccatccagattcagcgcatcttttccacccaatacatgaagcagatgtgccagttccggaatgttgattccgacagcattttccggagatcgcccatcgacagtaacaaacagaatctttccttcttcagtcagacaaatagcactacgcggatgtttggtttctataaaattggcattgcactgactccagtcatagtattccccgtctttcagcatcaacgggccagaagctaacacagaacctttatttttcttgtagttcttctcgatctgcctgtcccaaggaatgagcttcacttttcctttcttctcataaaccgctcctgtcacccgcaacttcaattcatccaacgaagtagtgtccacaacctgacttcccaccttcagaaaacagacggagtttcctttcgtcatatcaaaataggagccgttgatggctccgatggcctgatgtttccgggcaatccggcttattttctccaattgtccggtaaaggcaatgccgatctttttgccagtcctcggatttatctccaatatattaatggactgagcgccttgataaagaaaagggatggaagcccgcttatgtacaattccattttctacggtcaccacttcccaaggagctgtcactattgctatagagtcagcaacagtctgtgcatttacgaccctaacggacaacaagattagaacaatgataccaacaagatttcttctcataaacagtctgtaagttttggattcatatttcgtgtagcaactaatcacacaaagatatacttctcccgtcatataactaatatattcggatataaattaattcatttatatgtgatttgtaatcagatgtatgaaagaagcatggaggacttgacaaaccgcttttaatgttgtatctttgtaagtgaaaaccggaagtaaattcgataacattgataatatagacgaaaaatgagcaataataagtataatataataacagtttgcaggcattcctactccgggtaatgcttgttagatagtctgacacaagctaagggctgcgattctttatgggaattgcggccctttttgttgcttaaaatggatattccttgcagcaagatcgaaattagagtttataataaacttggaggacgtttataataaacgatgaaagaatttattaataaatgactggaagttactgtatcattagtcaatgtatttcgtatagatgttggtgctgattttgaaaagttctttatcttctaagtaaatcggtaaattattgatacactattctctttctctttttttgtcattaaactgaataccttacgatgaatgctttcttaaatttatgtgatacaacacgtgtttatgtaacagatgctcagcaggaacaagcggatgaccaaattctctaacccgttccatccctattttctgcatcacccgttccgagcgttggttggggagagaagtaaacgagaacaattctttgatatctaaactctcacgagcatactccaaacaagcggttgctgcttccggagcataaccatgtccccaatattcgtgcgccaatcgccagccgatttctatacccggagcaaaatcaacgtcaaatgtgatctgatgcagtccggtatatcccataaaagcatgatcctctttacgctctacagcatacaagccaaagccacaggtctgaaactcattttggatacggtgataaaaagcaagcgattcttccggagtcagcggatggagaaaaaactccataacatgagggtcggcgttcatgcgggcaaaagccggaatatcttcttctttccaatcgcggagaattaaacgggatgtttctatgtaagtctgcataataatggtaataaatgaggtgcaaagatacacctttttttattcatttgtatggtaaggaagtgtaaaccaaaagcaggagcctgctccttcagttgaatctaccccgatttctccttccatctgtgttatgatgcttttacagatagaaagtcccagacctgttccctgggcaaaattgttcagttttacaaaacgttcgaatacgctgtttatcttattggcagggataccaacgcctgtatcgcgcacgtagaactttattttctgagaagatatctgttcgtatcccaaagcgatagtcccctcatgggtgaactttagcgcattatttataaagttagtgatcacctgcatgaaccggttcttatctgtatagatatgacattcggggatttgcttttcaaaaaggagcttgatatctcctttcactttcataccagtggacttgataatttcagagcagacctcatttacatccaagtccgcatatacaaagttgaatgttcctgtctctatcttcgcaagatcgagaatatcggatatcagtcgcaagagaaggtcattattatcctgtacaatcttgatatagtcctgacattcttccttgctttcggtttctgccaacagactggaaaagccgacaatcgcattaagcggagtacggatttcgtgactcatattagccaagaaagcagatttcagacgatccagttcttccgctttatcacgggcgataattaatttctgttcagtctctttcagagtggtaatatcataattgatacacagcatttcgataatgccttcctccggatgataatctctgaccataacattgatattggtccatgtatatttcccgttctctctgcagacacggacttctttccgcaaactggtagcttttccttctttgactccgcggacaaagttcttcagaaccgcctgatcttcaggatgtacatgtgagtatactccaattacttcagtcatgggagtcccttctttttcacctaaattccgataccatgtatcttgggcatagccatccctggtcagtacattgaagtgtgcaaaccccacattggcataatcgccgatcaggagaaacagattctcaaattcttgtatcttggtgtatgcattggtggtttccgttgtatctatattgataaacagatagttgatgaactgattctgagagtcataaagtgtcgtcactttcgtagtgaggttaatgactcctttccgttgagtttctatatatttatttactttggagaaat

SEQ ID NO: 4614 - DNA, 21711 bp, Unknown
  gut microbiota DNA sequence
ttagccaatccatatacatcatgtggtacatagaaagtataattccaagaattaccttcgtggaaaccgggattcggttcaaagttctctccctgcctcggattgaacggactgtagaaagttccgtctggaagaataggtcggaatgtaccgaactccttactataataatgcttatatcccaaagagcgtttatagaacatttccgcatctttcttctttcctaaagcatccgcaaaacgggaaagggcaaagtctgcgatataatattccagtgcatgagatacggagttatcatattgttcacgaagcggcacgtatccttttgacatatagtcatcattgtccggacgcatcagattttccgccccgggtaatgtagccgacttgtacatagcttcataagccagatctacgtcaaagtcacgcaatcctttcatccatgtatccacaatcactgggatacttggatcaccttccatcgtaagagtctctcttccatacaattcccatttaggaaaccaaccatgttcacgatacatatcgagcatggtacgtaccatttccatctgacgttcgggataaaccaaagtcaaaagctgatgtacgttacgatatgtatcccacaaagagaatacagtatatcgggtacctttcgttgtcagaatctgatcgctctccatagccggatattcaccatttacatcctgcagaacgttcggatgaatcaacaaatgataaagtgccgtataaaaaactgttttctgtgcatccgttcctccttctacagtgatacgtgacaagtcatcgttccactgtgcacgggcatcggaaagcacctgttcaaagttttttcccgactgttctttatccagattcaaacgggcattctctatgcttacaaaggaaactcccatctgtacttcgacctgttctccttcctctgtttcaaaagtgaagtaagcgcccacatcgtcacctgctatttcttttccatagcgggtatacaatttatatttgccttggtctcgatcccattctgcttccacacctgtcatcggacgttgctttttccaatatccggttgtggtgggaactttgttcactctcatcacaaaatagatgggaaatacagcttggggattataacagaaagtacccaatagtttcattccctctatttcgctgtcacttacacgacgaagcatggctccactctcattggtcaggccttcgcccaaattcagaagtatatgactctttcctctaggaaaagtgaaacgggcaatacctgtacgcggagtagcagagacttctgtctttatattatacttcgtcagataattggaataatagccgggagaagcctgttcatccttatatttgctcccatattccttatagtctacattcagttctccggtagtaggcatcagcaataaagaacccagttcaggacaaccgacaccactcagatttacatgagaatatcctgtaaagaaacaattggtatattcataaggcgtagaccaccaacgtgcatctttatcgtaagtattatcagcagaacccatcacattaaaaggtactacggacatcattccattcggacaaacagctccgggattagtggtaccgaaatttgtcgttccaataaaaggatctacatagtctatcaacagactcttttccttattcatagggggggccttaccctctcccccaaatacggggagaagggtgaaagccagtgtgcaagttaataatatacgtctcatatccttcttagataatgctcgtccgttttgtaaaatcaattatttcctggatatagccgaaagccattcctacaacagtatctgcagctccataataaacagctacacgctcaccatcctgcaatgccgcacatgggaataccacattgggcacatcaccttgaagttcataaggtgcagccggacctatcagatattcacgggtacgataaagtaccttttcgggatgatccttatcgagtatcgccgaacccattgcataacggaaaccgttgcaagtagtgataacaccatgatagaaaagcaaccagccttcatcagtaaggaaaggtaccgaacctgcaccaatcttggtacactgccaggcactttcagggaaaggagtcactttcataacacaacgatgttcaccccagtatttcatatccggactgtagctgatataaatatcaccgaacggtgtatgtccattgtcgctggggcgacttaacatagcatatttgccatctatcttttgcgggaaaagtactccattacgattgaaaggcaggaaggcattctcgcattggaagaaatctataaaatcaaatgtataggcaataccgatagtaggtccatgatagccgttacaccaagtaatccaatatcggtcttcaatccatgtaacacgcgggtcatatttatattcggattcgatcatttccgtgttaccggctttaaattgaatcggttcatgactaatatcccaatgaataccatctttactgaaccctgtgaagatattcatctgtacagctttgttgtcacaacggaatacgccggcgaacccatctttgaaaggtacgacagcactattgaaaatactattggatgaaggaatatgatagcgtccgatgaccggattttgcgagtaacgccacattacatctgtacatccgacaggacgttcttcccagggaatttgaatcttattcataataattatttatttagtaattagttatctattatcactcaaaaatagcaatttattttttcttttttgaatcatcatacgtaaaaggtataaaataggtcatcaaaaaagcaggaattgttgcgatcagtacatagataaagaaactacggtatcccagtaaatcactaaaatagccgctgatcattcccggaagcataactcccagattcataattcccgaagcaaatgcataatgtgacatctgatgtttgccaggagcaatctgctgcatcatgaacaaggtcagtccgacaaatccgaaaccatagccgaaatactccattgtgatacatgttccgatcagataaagactggtcggctggactacagcaaggaaagtataagcaaggaaaggaaggttgaacacgcaacaaagcatgaataaagttttcttcaatccatatctggcaacaaatattccacccagcaatgaaccgataacaaaggcggcagaaccaaagacgccattcaatgttccgatttctgtcaatgacagccccagacctccgacctctctggaggcacgcagaaacaaaggagcaaccttcattataaatccttccgccaatcggtagagaataatgaagaagatataatatactatatgttttttagtaaaaaagttcccaatcacatttaccaaatcctgcatgatttctgaagtagttttttttccggtagcaggaacttgtgtagaaggcaacatctttatatgataaagaccgagcaataccattactgcagcaattacggcaaaaataatcatccatgcagatgaatatgcacccttattggcatctatcgaagctccttctattgccccgaaatgttcggccagcatacctgccaaagcaactaatccaccattggcaaccaattttgccacattatagaaagccccctgcactccaatatatttagcctgatcctctttattcagttctgccatatatacaccatcgcaagcaatatcatgtgtggctccactgaacgcaatcaccgccatagtggaaatactgatagcaaagaaataatcaaagaataacgaaaaagctactactccaaacaatataccactcaacagttcggttaccagtacaaaaaactttttggtccgatacatttcaagaaaagggctccataagaatttgagtgtccagggcatcatgataagagaagtccaaaacgttatctgagtatcagaaatacccaaatccttaaacatgaatacggaaaccaaattgatggcaataaagggaagtcccattgcaaaataagcggtaggtacccaataaatcgggttgatagtttttccttgagaagcagttttattctgttgcatagttcaatagtatatagatgaaagggtcatttttctgacccatctatatataatacaactaagaagggcaaactactaacgcttgcccctacttttttttattttattgttacttcgtcgataaagaaccacgaaggatgtcctacaccataatgccattcgggacattctttcgtaccggtgacctcaactttcacataacgggcatgcactggcatttccgattcagtcttcactccgcggaactccactttccccgaacggttttccggcatatcatgtgttccccaatgtgtataattctctccatcttcagaataggaataaaccaccttcagagggaaaagaatccaggctccgatctgatgcaggaaatccgtatctatactatgtatttctttctctttacccaaatctataacaaaagcaccgtctgttccttcccagccaacccagctttcaacgaaagtagatcctccgaataatccatccactaatgccgtttttccgatctctgcatatttaccggtaggaggaataagataagtaacctttgctcctatcgcaacgcttttttctgcacggggcatatatctctcccgatacaactggcaatattccacaggagaattggaacgttcattcaatgtcggtacattaaattctttcacccgttcttcaaaaagtgccaatttcggactgatctcattcatatctgtaccagtctcagtacgggcaatttccaattccgaatactgaatgggcaagcgggcacgctgcacacgcttcaggaatttattatcttcagccaccgctttctctgcatcatcaaacagttgattataacgtcgcatcagttgtggtttcagcattccgtatttatgggaaacaggagaatcataaatccacaatctttgtccgctgcctatcaacgctccctccatcaccttgatatactgataaaggtatggcgcagcctctccatagtatccatgcaggaaatgctgcatcaaagaatcaacattcgcttcggggttccacattaacttagataccaaataggcacgtaactcagcgaagtctcctcccctgcttcctgcaatctgtgagaaatgcatagtggcatgattctttttgaacagacgaatattatcctgcaagatatgaaaattagggaacggagccagataattatcaaaattaataccataatcccacacgaaaatattattagtgatggcagcccagccttccattgctttcacaaactctttacctgaggcattttccgtcaaagtcacttcacggtcacaatctatatcacaaagcatgatattcacattcggcaatggcttcacatgtttcggaggattcatcgtatacagataggcaagcgtggaaaattccttatcgggaaaacgggcagccagcttattcaaaaaagtaatgatacttcctgagagtgctccttcataatcatctatcgctttgcaggcatcacatgtacaattggtataattaccatcattctgactcacagacataatatgcttatccggatttgccttaaaaatagaatcaatccgctgagccacgatttcaaaaacttccgggttactcagacaccattggcttgctttcccgggatggcgtttgcctttaaaataagaataatattccggatggtcttttccatatacggaagcaggaagcaacttatcaaaagtatgcacccaataaccggcagcaaacacttcgtttggctcttccagcctgttccaccatttatatatggagtctgtacgaatagcataacattgtgtctggcggtaacggaaagccggattatctattttatcgataagcggcagttcgattgtcttcgcagggttaaaagagtattcgttttctccccagtaatccactccaagatattgttcgagtaaagttacaactccgtagactgtcccattcccactgcctgaaatacgtaagattccatctttcgtagataggctgaaaccgtcttctgtcactccagctggggttttgctactgattataatatctcctttttttgcattctgcccttttacaatgggaaatgtacaacctgaaattctctgaaggaacaattgaaataaatttgctgatatttgattaatctggtcattttctgatagaataatcctggatttagtttttccattatcaactaaaacgacttgtgctgttgcaggaatataacaacatgctcccaacaaacaaagcagctgaaaaataatacggcgaatgattctcatagcatttcctttaattagtttttagataatacaatccaaaaatataagatactcaagaaaaaaatcagttctaagttttattaacaaagaaaacttagaactgatcacaacatgatataaacagcaaatagcccaagctcattcagtaataaacttgggccattttttattcagtttcagtataaatacctacagtattaatataaggagaataataaagagctccatggaaagttactcttatatattgcgcttgtttagccacaagaagaagaatgtaacttgtcttatttgcaaatcctgaagctacaccaagatcctcatatttctctccatcattacttatcgctatacttgcactttccgaagaataaaaccattcatagaaatgtaaagcaatagtttttatattctcttgttttcccaaatcgatatcaagtatgctgccatccggaacataatcatacaagtcgctagattgtccattcaaagtaaaactccaacccgaatggtcatttattacagaacctaccggtttgtctacacaagataaaaatccgacaagtgctgttttataaacaatatatataactttattctcgcctatatctgctcctactccatcaacattcgtgattgtcactggaataacatagttagtacccagctgcacagaagccatatcatccgaaaaactcaaggcaacactctcttccggagttgtttttccttgtttaatcattattgtcgattgctttaaacttgcactagtcagtaaagaataatctgtgccatgcaatgcattatacgttccaactaatgccggattaatagcaagagtaactttggtgtcaccatctgcggcccatgccgattttaagataccgtcaagcttccattcactgcttaaatttgtaaatccttgactatactgatactctaacagatattctttacttgaagtcagtgtgacatgatttggtttgtaagtcgattcaaatgtcaagaatatcttactattactttcactcgctgatactcctgttccattaatagaagttatagcaatcgggagaatataattttccgatccgttcttaaattcttccatattagtataatgcacttttaaagtatctgcagagatatattccccttgttttatatacaaagttgcattttccagttctgcattttgtaaagctacatagctcgttccatattcactgttgtatgcatctaccaatgacctgtcaatagctaattggatggtcaaatcttgtggtgcaggtttagtacacctgacaggagacaaaatatgttcggtggcgatttctttcaaaaaagttccgtctcctttatactctaaagtagcatttgtttcacttggtttataaatatagacataattgatatcatacggatctgttgcttcgtcatcgtcacatgctgtgactaatggcaatgacatagcaaaaaatgtactgtataatatatatttaaataatgctttcatatcatactgttttaaattattgagcaaatgaatatgtttcccatgtcaccttttgacggttttcgttacctaggttagaattgccaatttccacatcatgaccattaccggttacatcgtgtagtattgtagctccttcaccttcattcattggcagatacaacaacaaattcttgtctgtatagtcaacttcggtatacatagatttctttatctgattaactgtgcgtgtaactttccaaaaacgaacctgacacatttcacagaaatccggaaaatattcttctcctgaagaaatcatctgaaattgatcaatattcatcggttgtcctattgaagaagataatgaggcaactacagtaccattttggtacaataaagtagtaccggatgctgcatcataactcactgcaaaatgataccatttttgtgcttctaaaccttttcccttagttggatcacctgtatcaaattgagaccccatcgtttttacttgtaggaaattatttttatagctaccattctcggaatagattaagtcaccaaaccgtatatatagttctgtccctgaacctcctgagtttattatagcctgattattcttagtatatccaccgttccctgatttagaggtgactttactccaccattccaatgtataatttggcaaagctaacccccaagctccttccggggctgcatgcataccattataccatgttaatttaggaacagcttgtttcaaaggcttcacaagaaccaataaaaaactggaagaggattccgacttctcaatacctccttccacattcttaatactgatgggaattgcatattgagcaccgccttcagcttcaaaacttttaatatcaacattcacaggatctgcacttacagaacctgcttcaattgtcactgattcaggaaatgatatatattctttaggaggcattttataattagtttcattcttcttattataagcatctaatacagattcgtcaataaataaattagcttttattgtttgattaataatattcaccaaacgtacagttaacgaagtacgcgtcgtaccctctgtcaatgtcaattctttagttttggatgtagacgcttcatttatatagactaaattatctataacatcatacttagcattttcacatgcagtatggaccagtgccagtaccccaaatgccattattttaagtaaagatattctcttcattgtttaaccctttcttttagttattaataggaggattctgtgcagcaatagctgcacgcactgtgggataatcaggatttccaggataatcatactcaatatgataagcccccatacctgcatgttctattccacaagccggatgatagctctgttgctcggtaaagtaatgcttatccactgctctttcaaaagttgcagtcacaatagatttccccatagcttctttaaagacattagggtgacttctacgtacagcttcaaagaaagaatccaatccagaatgtcctagttcataggtctgccaagctatataatcaagacttagaactgtttcctctgaaagcacttcataaaagctcaaccaacctgcaccaccagggatatcagcaaccaacattttccccgtcttatcaaactcctcacgtaaagtcttcataaacgcattgggtactgatggcatactggagttcattaaagtcccccaatcctcaatatcataatcaaatccatcgatattatatttgttacatgtatctacaatagcaagtgcatatttcttagcagcctcaatgcaagattgctcatctttaggatcaaagccccaaaacgcttccttcactgcatcatcgttaccccccggtgtgagattatcaccaatatctcctgcgcgccaacaaagcactgctctggaacccttagcctgaaagtcttttaaatcagcctgttgctcaaccgtcagatttccccaacagagccaaaggctcacaaaatccgtactgtccggtaatccacataaagcatattgcatggaagaacctcccttacctgcccagttaccaaaccagccaaacataatcttatgtggagagttaaaataatccttcaaattattttcataaccttgcgtaggaggttcataataatctttcgcctctatgtcggtccaatcactacatgcgatatttaagaatccctgcgaaaaaaagagagaaattcctattccgtatattatttttttcaatttgctcgttttcataataaaaattattttaacgttctgatttaatttttcttagcccaccaaagatctgtggcagagttatctacaccacctaacattgatacagctgctttcacatttgcattattcgtattatattctgactgagggaaaggcaaacgacgcataccacgctgcactgtcaccccatctgtattcagattattcacgatagggaatagtttaggataacctgtacgacgaatgtcagcccacgtttcccaaccattcggaaaattggcaatccacttctgaatcaaaatacgctccaaattctctgtaacacttgctgattcattatatttcggagttacagttgacactgctgctatatccttacctgaatccgaaggatcactgtaagcagcaggaaccttttcacttttcaaataatcgccaatagtagctttacgttcttccatagacactgtcactcctgtgtcataaagttctttgggagttcctcccatattccatttatacatcaatgcagcttctgcacgtaaaaaataagcttcagatgcagacataatgagcaattcatcatctataccaatattcaggcgggagaattttgtataatttgcctgagttgtagcactttggtaaataccatttcgcactcctatttgtcctccaccgatagaagcatctgcttctgatgcatatttagccaaacgaggatcattataaccgcttaaatatgaagtgatattagcactgatacgaatttcattccatgaagaagtaacacgataatatggattcataccgtcattatatttactatatgcagcatctgatgcagatgtcatcacaccaattacatcagaaacagcttcttctgctttctccttggcaagtgctggagaaacactagaaatgcgcattgccatacgaagctttaaagaattggcaaatttcacccatttgttaaaatctccattaaatacaagatcgtattctgataaagaactcatatcttcattacctaacactgctactttaaaagcggaaatcgcttcatccaaatcatcaaacatgtgtttataaagatcctccatattgtcatattctacagtaaaagcagttcctgtaatttgagaataaggaatcggtccataacaatcactaattttaagtgaagctgccacacgaagaatctgtgcccattgataagccaatcctttgccatcagaaagatcacgtatctggaaatatccggtataaatctgtggcatagtagtatcaaacatatttccataccacccaactcttggattgtaagtataataattacctccattaccccattgggcgatacaagtaatttctccaccatattcagatccaatcatctgatccaacatctgtgaattgttctgttgtccttgtactaatgcaggaatcatgcttttaatcaatgatccggtgattgcattatcacccagcatttggtcaggtttaggtccaaagggatttgtattatactcttcaaatttatcggtacaacctgttcctagtgctactaacaaagtatacacagacagttttgcaaacttctttattatcttattctttttcataatctaaactagaatgttagtttgacattaaatccgagacttctcaaactaggttgttgaaaatagtcaaccccctgatagaaattactagtgacagaagatgtactttccggatcataaggtgctttacaataaatcatccataaattctttcctgtaagccccagtgtcatatttacatgatttttgaaccatgttttaggaagttggtagctcaagctcagttcagaaaggcgaatattcgttgcactatatgtataataagtaccaacagcggtagttactttactataatattcctcagcatccactttactgtctccaacccatacaccgcctgcctgacgagcaactgcagaactttcagatacaccatatttatcaatcatggcttgtgtatccgatacaactaatcctccaaaacgcccggtgaatgcaaatccaagattccatcccttccaagcaacactaccattccatcccaaataatatttaggaagaatagagccaaccttgcggtattccgtattttcaatagccaaacttccattagaggggtctttccaaatatatccattaggagactgacgcaaacgctgattgatataaatatctcccattgatccgttttcatagagtcttaaagtcggaccaccactagttcccaatgttccttttgagtaatactccatttcgatagcttcgccggtttccggattgatggcaccattcgctaaactaacgatcttgttttgattaagagtgtaagtgaaatttgtagataccttcactttatcaaatgtatcagaatatcctaaagccagctcaataccctgattctgaatattaccagtctgcacaatattattcttatatccagatgaagccgatgcatcaacatagaatgtctgattgaaggtattagaacgatagaaggtcatatctaaattaatacggttgccaaggaatttagcattgacgcctagttcccatgattttgtattttctggtttcagattagtattataatgacttgcaggatattcatatgtatttgtttgctcattataagtatattgcatttgggtaaggtatcgattaggggaagaagcgacctccgcccacgaaccacgaactttcaaataagaaatagcttttggtagctttacagattcactaacaagccatgacagaccaacagacggataaaagtaggaacctttgctggtaaaagctaattgagatgcccagtcattacgcccagtgacagtcaaatacaattgatgattccatcctaattctgcacttgcaaaaacactttgtacttgatcatgccattttgattcattacgcttggaagtattgacattaatattgccataatggaagaaattaggaatttgctccaatcctccttttagatacatagcatcttcctgaatatcattaatagaagcaccaacagttgcattcaatgaaagtttgtcatcaaagaaattcttatttatgctagccattacatcagcataaacagaccgatcattttgtttagtatgtccataataacctttagaactactttctgtaaaagttcctcgtgtactagcataatacttttcataactatcgctatctgaattatccacacgtactcgccctgttacattcacccaatctgttatatcccatttcagactagcattaaacatataacgacgtttagaaagctcattctgcattcgattcataatccaatatgggttttgcatatccaaatcagtaccaaatatagattccggccaatattgtaccataaggtttcgagcctcactatagcgttcatacatctgtacttcctgaaagttttcacctcgtggaaaaagataaagagataccaagggattaaaatattgtccactacctaccatattcttattattttgaataatatattgagctcccaaatcaagactcaacttattatcacagaatttagcggtattacgaatagagaaattatagcggttataagcattattaggtaagatacctgtagagtttgtagtagagacagatgcgtaagtttgattttgttcagtaccagtggtcaacgtgaaaccattcatctccgtcattcccgtattgaagaagtcagatggatcaaagttgctaggagtatccatcaagctcccccaactgcctaactctccttcacgattaccataaatattctgaaacttcggcatcatcatcggagatgaaaaacttgtactattactataagaaatttgcacttttcctacagtagcttttttagtagtgataagaataactccattagaagcatccgaaccatacaaggctgcagcggaaggtcctgttaaaattgtcatgctctcaatatcttcaggattaatatcagctacgctattagatcctggctgtttgttcatcgtacctccagcattatctcctgaatttacattaaacattggaataccatcaataacataaagtgcattatcatttttctccaaagactttgtaccacgcataactacacgagccgcagccccagcaccggctgaagaagcatttattgttacgccagctacttttcctgataaagcattaataaagttagcatcctttatattagtcaattcatctccctttacttgctgtacattataactcaacgctttttgttcacgtttgatacccaacgcagtaactactacttcgtccaaggtttgcgtgtcttcacccattgtgacttttaggggttgggcgttggcaagcgtgattgattgggagatatgcggagtagtatgagagaagaacatctcatactaaatataaccattaatatttgtatttgataattcatatatttgtgtaaatatataaattgttgagtggatagttctgtctctttatttatgttgttattatttacaatgtatagtaaaaacaaaggctgcctcattccaaaggcagccttttctatatgtacaatttattgtagtttgttgctattcttgcggtgggaatataaacccgttccctttgttatcatcaaaagaataacttgatggcttgggtaaattcttaccattcttactccagtcccaaagcagagtctcatcctctgtaatttctccggtagcactatccctcttcttcccattcaatggataataaagcagtaaattgtcatcgtcaggatttaccatcttccatatattcgaagctatctcttgcgaagttctggccgttttccaaaaacgaacctcacgaatcagctcgtttgaaccaccaatccaaaagccaatcaatccataaggacctgttctgatttcccggtcagcaaccagcactccgttcacgtatacataatttttttgaccatcatatacgaaagctaacatataccaagtgtcaggctgtgcagagaatttgtcagcgggaacatcaatctgagagcttcccgtcttaatttgtaattgattagggttaatagttacatcaccgaaacgagtataaatctcatccataggaccagcattggcaaccaatttagttccacaaatagaacgattgttacttttgtaactagccctgttgaccataacttccattgtccattgatcaactttgaaatcgttagggaacattttatcatcctcgctccccgaaccacttccacttgtacttatccggagcgcttttgtattcactctttgctcaagtacaagtaaagtctcttcttgccctctgataatattcacgtcacctcctgtaatacgtataggcaaagcatagttaccttctagtgagaattttacattcttcaaagaaataggaacatccatcattgcataaagaggcataaatgttattttctgtgagatctcatacatctctttaggaagtactatatagttagttccatttttagcattataagcatctaactgagcttgattaccagcctccaatgtaacttttatttctttagtatcttgaacagctaaagctacttgcagccctttaatttccacatctttgccttcttccacaaagctttgtaatacgccgttattagctatatatactccttgctcactttgaaaatcatccaaaggattcttatataactcattttgacaacctgttaagaataacagaacagctaaataaatattctttttcataatagtcattctttaatattaatcgaacttaccaggatatacctgattaccaaaatacaaggcttttctcaaccatttgtaaggagggtcattcgggtagtcatactccatatgataagtgcctataccacctattctcttaccactgggcaaatcgagtgttgcatagtcaagaatctgattcccttccatgctgttcaattcaggacgtacacttgtataataagttataccaccagttttccacccttgttcaaattctacggtaataattgttttacgctcccagtcgtccagattcggtttatttattttataaattacagaactagtacttgattcccaatatgcctgatagatataatgatcaaccaattttgaagtttctgtagataagagatccggctgaccatccataactaacattcttccagcaggacgtagacgggcacttaaagtttcaatgaaaacctgcatcttattattaccgctaggactgattgtctggtagtttgctaaagttccggaatgtccatatccaggttcgtagtcaatatcaaaaccatcaagattgtacttttcaatactatcacaaatagcatttgcatatgcttttactccttcaatgaagtttccttgtcccttttcttctacccaatattgcgttgcattcaatcctttaggagtcagctgatctcccaaatcttgaataatccaacataataatgcctttcctcctttcacttcctggaagaatttcaaatctgctttctgttcatcagaaaggtaacctcttgttccccagagagatacaaaatctacactatcgggtaacatcttcaaataattttgagcgttgtttccttttccagtccagttaccaaaccaaccaaagcctttcacatgaggagtttttctatattctcttatttgagcgaaatattcacgcatggtcggtgtaagatcttcttcggtttgggcttctattaggggaatcagacggtgcattccttcttgattctcaaaaacctctctttcttcagatgtccagtcagaacagcttagtatacttaaggcagatatacctatacacaaatactttaataatttcataattttcttttcttaaaaatgaatatcattattactgattaggttgtttgggcctgtttgaacgtacccaccataatttagtagctcctatatctccacctcccagcaatgttggaatttcagccatattaggattggaattataggctgtaggagcaaatctaaagcgttcaggaactctgcaatcttctattgaggcgccaattcttccaggagcagcttcatccataggtttcattaaatatgggaaaccggttctgcgatattcggtccaggcttccacagcgttcggatatagtgccagatatttttgcgtaataattttctgtaactgttcttcttgcttactcaaatttcctgtgtaatcatcccatttgggtgaagtatttccaatgcttaaatcatggttataagtgccatatttgtaattactaccagtgagtccggttggtttacctgttcctgacaggtatgtggcaactccactgactccttgctcttgaaatgaaatatttattccttgttcatagaacgttttggggtcaccacctatcaaattgtatagagcagcttctgctttcagaaaataagtttcggatgctctgaaccaatataaaggagaattagaatctactttcggacgcgatgcaaattttgcagaatatgaggtttccgatttagatttactattcgtcggtgcaaccggaaaataacctgtttgcgcccaactgccagaaccatatgttccttcagtaaaatatgcacttaacctagggtctttatatccatccaaatatccccaaatagtggcgcccattcttgtttcgttatattcattgacagatgctaacattgaattcagcaatggcattttatcagaacttttgatctttgcttcacttgaaatatcttcgataacaccgccatttttaggatctaatgctttcgtaatatattctttagccaaagtctcatctataaaatgtactctgacagctattctcaacattaatgagttagccagttttacccagttttgaacattgccattgtatatcaaatcgtactgagccatcacactataagatattgtattcagcaattctactgattttgacagatcagccagcatgcttctgtaaacaacttcctggctgtcgaattttggcgcaatacttccatcacctgctgagttataagcaataggaccgaaaacgtctgtagctcgcaaccatgctatatttctgacaatattagcaatctccaatatagcttgttctgatggggaatccgaatctttagcgatttcatatatttcattccagggcaaaaagatttgcgagtaaaagttctgatatgcataattcattctactatctgtaaaattccaattagcctcattattaaatccccaattattattattgccaaaataaccaatatagttaccagaagatatcaaatcagtattttgtaaatcatttccaggtccagttgtcaaactaggtgaacctatagggatcactctttgctgcatattcatgaaacgggcaccatatttaagaggacctaattccccatcggagacaccgtaaggattggtattgacagcttcataatcacaagctgacatagaacaaagtgccaaaagcagaattatatattttttcatattcaattcctttatttattttagaatccaaatttcaaactcaatccataagtagactggctgggtaacataaagtaatcgtatccttgaccaaaagtaccagtggaagctgttagttcaggatcataaggggccttattgtatatcatccataaattagtaccgtatactgacaagctcaaattattaacagttcctttaaaccatttattggggaaagtataagttagtctggcttcctgcaatctcacattagttgctgagtatgtatagtaggcatccaaattagaaactgcatcataataagtttttggatcaactttgaaatatcctaatgatacaccacctgcatcacgtgcatctgctgatgcttcagatactccatatctgtctaacatagcttgtgttttagatattacgattcctccaatacgagctgtgaacaacaagttaagattaaatcctttgtaactaaatccatgctgccatcccaaattccatttaggattcacgctacctagcttgtagggtgtggtggtttctgtagttaatgcttgacctggctgatagtctacataattatcaccatctctttttagccattcatttgcatatacagtaccaatttctcctccttctctcaaacggaaacgcccaacctgaatatccgttaaatctatcaaggtatttgttaccggattcaagacatcgcgtgccaattggataattttatttttatttgtcgttgcagtgaacgttgtactataattaaaattaccaaatttcttgtcaaatcctaaacttaattcaagtcctctattttggacattaccagcttgtacaaacatatattcaaaattactacccaatgtagctttcagtaactgattatatgtatttgaatgataatacgtaactccgaaagttattgtattattaaaccatttggaatcaagacctacttcataagaacgagttctttcagctttcagattggaaatcggataatatttaaaaggtttaaaggttcctccttcaagttcgtgagtgagagttccgggagttaatcctgtataagggatcggcgaacctacctctgtataggaagctctgactttcaggaaacctaaagttggctctaatttttctttaatattattgggtaacagttcagtaacgatggcagacaaaccaactgaaggatagaaaatccacggatcatcactgtttaccaattgagaaggcttatcggctctccctgtcaaggttaggtataaggccgaattccatgatacctcagcagaagcaaatacagcaaaatttctcctgcggctgtctccaccggtttgacttgcggtgctctgcgtcgggtctatattactatatacaaatttattcggtactaatagcaactgccctccatatccacgtccttttgtatcatattcttcgaaagaagttcctgcattgatcgtagcatgatagatttcagcaaactgtttatcgaagtttaccattatatctgcatatttctgtcgaaacgtctcgttagagtatgtatagcgtccgtttgtactagcatatgtgtttatggtagatgcataacgtttatcttccttttcagtatatgtattatctaaacgtacacgacctgccacattcaaatagttggtaatatcgtactttaaagaggcatataacatataacggtcttttacttccggacgaatattacgataggcaatccaatatgggttttgtatatccataccaaaatctccgggactccattgctgttgagaatatccgagttcactattatagcgttcaaaatacttctctttctcaaaatcttcaccgcgcggatataagtatgcgccaacaattggattaaaataagttccataagaaatcatattgttataatactcacgtatataacttgcagatgcatctaatgtcagcttatcattcaagaatttagcagtatttctcaatgtcacattgtaacggtggtacttgttattgggtacaattccatcagaatttacagcagcaatcgaaaaataagtctgattcttatcgtttccggttgaaagattaaatgaattattaaaggttgcccctaattcaaagaagtctttaggatcatatgatggttggttctccaatttatccccccacgaataatagtttcctgatattccatatctattttggaatttaggcatcgtgagtggtgtcataaactctactgaagaagatacatctatacgcatttttccagcttcgcctttcttcgtattgattaagattactccatttgctgcacttgctccatacaatgctgcagcagacggtccagtcaatactgacacactttcaatatcatccggattgaaattggcgataccttcacctgaagttctgccgcttccgaatcctgttccgtcgccagttctgtcagcttgattaccaattggtacaccatcaactacatatagaacattgttatctccgctaatagatttgttaccacgcattgtaacacgagtactacctcctacaccggaagcactgcgttgtatattcacaccagccacttttccgtttagactattgacgaagttagcatcctttacggaagttaaagcatcattgttaactttctgcacattatagctaagtgctttttcagaacgtttgatacccaaagcagtaacaacaacttcatccaatttttgtgtatcttcccccattgttattttcaatggctgggcattggtcaacgtgattgcttgggaggcataaccgatataggagatttctaacacatcacctttggcagcttgtattttgaaatttccatcca

SEQ ID NO: 4615 - DNA, 320 bp, Unknown
  gut microbiota DNA sequence
cgcatagtcaccaagtatgatggtgataaatatgtgaagcacttcacctgctggaatcaactacttgctttgatgtttggtcaactttctaatcgtgaaagtctgcgagatttgatagttgctcttgaagctcatcattccaaatgttatcatttaggaatgggtaaaaatgtatcaaagtcatcgctggcaagagcaaatcaagatagagactatcacatctttgaagaatatgcttactacctggttagcgaagcacgacaaaagtgtgctaatcatattttcaaacttggcggtaacgtttatgctttcgattcgac

SEQ ID NO: 4616 - DNA, 574 bp, Unknown
  gut microbiota DNA sequence
gctctacctgccagcgatttttataaagttcagcaacttgaagcgcagatatatgcatcgcattggttatgaatataaattctcgttcttgttcttcatcccaatatttaaccagcctaagtggctctgggtaatattgtttaggatagaatcctgtcagaagtacactcgcgtctgaaagcacattcttaggcagcctacgtttccattggatggatttgtacccgagattcttttttgctctgacaacaaagtaggcttcaatttgatgaattttatacagtattttgaagttgttataaccgcggtcaaagatgtaataagagcttggttcataaggaatttcaatcataactttagaatcgtgtacggatgcttccgtgatatgaaagaatgcaggaatctgtgtttccacatcatataatgtatgcactttgataccacctttatttttgcggaattttgcccaccaaaagactgaaaggcacaggtcaatagttgtcgaatcgaaagcataaacgttaccgccaagtttgaaaatatgattagcacacttttgtcgtgcttcgctaac

SEQ ID NO: 4617 - DNA, 1302 bp, Unknown
  gut microbiota DNA sequence
gaaaaaatttgcttccgtttaggtattaattagaagcaaaacaaacaactgcatcatttatcctctatcagaagacaaatgatgcagttgtcggttatatctgtttttcttataatgccagacggtaaatctctttgctgtcctgtttcgttaatttgacatagttgcctaccaattcgcctttattccggtgcagactatctgcaaggcggtcgatgtcgggattctcaatgccaagttctttgaaagtcacaggcaggccgatggaggtaaagaaggatttcaggcgcgagattccctcaagggctactgcctttttatcatctgattctgccactccccacactcggatggcgtattgggctatcttatccacattgtgttctgtcatccatgtcatccaggcagggaagattacggagagtccggcgccatgagtcacgttatagatggcgctgatttcatgttcgaggaagtgggaagcccagtcctcttcacaacctacaccacaggttccgttatgggcaatggttccactccacatcagattagcacgggctccgtagttttcaggttctttcatgacggtggttgcttctttgatgatggcaagtagtgtgccttcgcacaggcggtcgcctatctctacgtctttcgtgttggtgaaatagcgttccattatgtgtgccatcatatcggcaatgccgcaggcggtttggaaaggaggaagtgtgtaggtcagttcggggttcattacggcaaaaacaggacgcagtacaccgggagcacggaggcttaatttctgtaagccatcgactttcgtaatgacggtgttaccggaaccttcgcttccggcagcaggaatcgttaacacaacggctactttcaatgctttcgtcacaatggcttttccgatgtagaaatcccagaaatctccgttgtaaggaactccagctgcaatggctttcgccgtatcaatcacggagccgccaccaacggcgagcatcatgtctacgttctctttccggcagaggtcgattccttcatatactttcgtgtctatcgggttaggctgtacaccgcccagcatgcaatagggaatacctgcttcctgcaatgagttctcaacacgagccaataatccgctgcgtatcacagagccaccgccatagacaatcattactttgcgtgcgccgtatttctgcactagtgctccggtctgcgcttccgtgtcccgtccgaatacaaattcggtaggactgtaaaagataaaattattcattgtcgctttctttataggtc

SEQ ID NO: 4618 - DNA, 8823 bp, Unknown
  gut microbiota DNA sequence
tccgactaacctgaacaaactcgccccttacctgcagacaccacgtgacatgagcacttcttttttcaaagctacggcaggcagcgccccttggctattcaaagatcgttggaaaagaaaatacaccgaggctcccattgtttatgccgcggtagtgcaagctaataccgccctatggatgcccggtaataacgactattatcctgccgtatttgtttttgcacttgatcaaaaacacattcacgacaccgaatggctaaaacaaatagcagaagaaataaatgtattgcaagatgccgaccagatccccggtgattgccgcaaactaatacagacattacgcgatgataccagcgaattctgttttcgtatcggcaaaagtgtatgtggtgatgccaacgcatggtgtgccacctataaattcgacaaacagacagcactgccacgcaaggctttaccatccgatggcatcgtcccttttctattaaagtccgccccggtagaaaatcaatttgttgatttcaaactaatcccgactgaattttatatcggctaaaaatagataagcagaaataggcaaaccgaaagtaaacaatatttttttcatcatttataattatatctcacataaggaatatgcatgcatacattatccaacaactaataagaattatattgtttatcactatcggtttgcctataggactaaaaagttttgcccaagaaacaaaacgtttctatatggaactggacactccccgcaatggagccaaagcaggacaagagcttgaattaaaatacatcagcacagccgatttcgattctgtatctccacccgacttcggaacgcttatagaaacagttgaaggagcaacaccacacaaagccggtcatacagtaaaaaacggcatattgacagatatctacgagcagggattcagctaccgcatacgtttcaagaagccaggaaacaccaaactacctctggcatccatcaaggcaaacggaaaggaatacgaaacacctctgaccagtgtatgggtacatccggtcgataccaatatcgacagtgtaaaatgcagcattcagctggaggattcttatcgcaaaggagttttcactgccatcgggatctgtctcttaatcgcctggttattgatccgcttatcgtttcagaaacaaaaaaaaataaagagacaggataaataaaacagagaataaccctatctcattaatccatcattatctgcatctgcttatttattttttaagtattctctttaaatgttcgacatctaaaagtaagttcactgtttcaaaatttcctttataaaaaacgccccagttattgaaaacacaaggcaggtctttcgctttttggagtgtatccacttgaattaaagatacaggaacgttatttgtatcacaatactgttttaccatttcaatcttttgataaatataagggcattgcatatcataataaatagtcagatcttcgctttcaattttcatttttttcgcgttttgcgcaaatttcggcattgtcccgtcaaaagaaagtgcaagcagttcatatccattatcagtcgcatcaacaacttcaaaaccgaatttcttcgcaaacgattggtcagaaagccagttcttctgcttctttgagccaagcatacaaacaccggatttgcctttttctttggcgtctgtcaggcaatattccatcaaagctcttccatacccattccccttaggacttcctaagacccataagcaatacagataataatagttatcaccaatgatgggaacccaagctgtctcaagaggtgcatactcaataaaaaccgtagcttttgcatttagctttctaaaaacatgaccttcatttagtctgtcggaaagccattgccgcttcgcgtcaatacctgcatgaggctttttactgcgaataatgcagcatagatgctcatcactgaggttttcctttgttaagtttacaaaatctgtattcatatacgcattcgttttaaattagatatcatcaatcaaccgatcttaacggtgcactctgccattttggctgaatataatagttatagtttcataagagatagtgatttagtattaaaatcctctttaaatctttctctctgccaaaaagagataagattcttttttgctcttctatagttggtatcttgataattaaattcccaatgaatatttccttatattcttttacacaaacagactgccaaatatcgtttttcttaatttgaagatcccccatgacctcaatatccattaaaggaagtttgaatctggcaaaattagaacgaaacaaatcatcctcttttgtttccggagatatttccatatatgtttttagcaagtgttgcaatttgcatgaattcatttcggtagtcaaaatatcgatatcagcagtttctccgacctctatacctgataaaatcatagcagatgcacctataacataaaaatcaggacttatttcctgtaattcaacagttatacttgcaagactctgagttatcttatctttaattttcatatctccaataatatataacaaaaatacaaaatatatttcagaaaggtaaaagagcaggctttaataataccattaatgaatgtaatgagagcaactatcgacaaaattcctctttttctatgtagctctaacctcctgcaaatttcatcaatcgccttattataacaactacaaggttcagtactacgatattccaatgtcagggtttgataaaaaatattaagagattggtcgcttcctatccttggttgcataatctttacgcattttaattctaaatattgcctccatattagcaaatccttatttttccctagcaaacttttgacacctcaacagcataaacagtatttatgggataattttagaaaagctgaaacgagtaagcaaagaattattctatttccttaattcgttcaatctgtctatccagaaaataatcagtatataggctgtagtcttccatttcataaaacgctatcagtccttttctgtaattcagtatatccgaatctttgacaggatatacgggaatgatgccaacattcatcaaagaaatactttctatcattcttgcagtccgtttgttcccgtttgaaaatctcatcaaacgacaactgaaaggccatgacatacatcaaacatcatcccggccggattgcactcattttgctaaatacaggaagcgatctatagcttattgtcgaagatatgttacaagagaatgtatatatcctgtgatctggtgaagcggaagctcaggaaccgggttatagtagacagattggaactaaagctatgtacacactgcgagaaaactcttccgttacaccggttttacgctggcaggatatatatggtcaattttaaacattatagtaatgccatgaggaatagatatggatacaataagagcaattgaaggagagttatcgatacaaaacttcaagaagatattaaacatatataaataagacaggattattttttttacgtcatttttttatctatattaaaggtcagagaataaaccaacaattttaaatactttaaagagatccaagcaaataacaaaaacatattttacacaacgccttaaagtctgaaaaatagtaacattatttaaaatccagtagttatgaaaacaattaattatttttccggctcattgcttgcattattattttatgcactatttgctgcatgtaataatgatttgcaaactattgctgtcactgaaataaaaggaatagaacaaactctcttaaacgaaagcaatgctttaataagttcagatgtagcaacagatagtactatgcttggtaaagacaacacaatatccaactcaacgtctgctactaatgcattcttcactaaacaagaatatgaagaggggatggattggtggaaagatagagaaggtgcgctacctgctctatatgaatatcaggtatcctgtcgtgattttccttctggacatggtcctgatacttgcatatattatatgaccattatttggacttgttatcctcctattacagaagctaattggatggattatcaatatatgcaagtacaacataggctaataagtggtactactgcatttccttggcgttatttaggtgaagggggcccggggaattataattatggaatagtgaaagtcaatggatttcaagatcctatggatttaaatgctacacatttgcctactagagttcagcttagatatagattgttgcataaagatttcccagggaaagcagataaaagtattaatgataaagaaaaatggtacaataaaaaccttgcaactggatggtattataaagattacaatcagccaacttataataacccttatggttataattcacaggatttcaacaatatggaatcactaaaattcataattaatgatcctaagtgtggctcatctttttctgtaagagtgcttgttgatggatatttagtttttccccaattagtaggcggaagatatgaagttactgttccaaaatttaggaagactggagaatatctcataacagctgaatacgcaggcaatgtttcggaagaatttaaaactgcagtgcgacacggtatctatcaagaatatacaagcaaagaaatttatatcatgtttagttgcaatgagtttagctatgattaacaaccttacatatcacaataatgaaacgaatacttttaattctattttgcagtctacatagcattttgtttctccgttcacaaaacgctagcagcgacatcatcttcaaacagttcttcgataatgccattgcttttgctgacacatacccacgtgagaaggtatacttgcattttgataatagtagttattatgtaggagatactatatggtttaaagcctacacggtatatgctgagaacaatatgccaagcaccatcagcaaacccctttatgtagaaatgctcgaccagacagggcatattacccaacgccaaatcattgaattgaatagcggtgaaggacatggacagataatcctgaatgaaagtaccatgtccggctattatgaaatcagagcttacacccgttggatgctcgcattcagcgaaccttcttacttctcacgtacattcccgatctatcagtctgcacaaggagaaagaccagaacggaggatttcgacctataatctgaatccttccatgaaacagcgaccgaaaaatgtgacagataaacttgctatccaattctttcccgaaggaggaacactcgtgaaaggcatctcttctcgtgtggcatttaaagctgaaagtagagaagatggtaatgttatccttgaaggtgccatttatacgaaagacggggaaaagctgacagaaataaaaaccctacatgacggaatgggaatattcacttatacacccgaagaaaaaccagcagtagctaaagtaacttataaagaaaaagaatataaattcaatctaccggacgccctttccgccggatatgtattgaacgtgaataattcaagcggagctattgtaggtaacgtattgagcaatgagaataccccggatgcagacattgtagcattcataagtcatgaaggtcgcccctattcgtattggatactacgaatgagatcaggtggaaatcaaactttcttacttaaaacgcgcgatcttcccggaggcatataccaagtcagtctactagacaaaaccgggaatatgctgtgcgaacgatttacatttgtgcaacccaataaattgaattcaatacaattaaatggaattaaagatatttaccggcctttcgaaccaattcgctgcgaaatacaagtaacagatcaaaaaggaaatcctttacaaggttctttatccatatcagtaagagatgctatacgttcggattatgcagaatatgataataatatatttacagatatgttattaacatccggtttaaaaggatatattgataaaccggggtattattttgcagatattacgcttcgcaaattacaagaacttgatgttttgctcatggttcacggttggcgtcaatatgacttatcacaacttacttccggtaaaaatgaaaagctacttcaacagtcagctgaaaaagagttgttactacaagggcagattcgttcttctcttttaaaaaaagaaatgaaagatatggaggtaagcgtcatggctaaagtggacaatacatttgtagcaggaaatacgtttacagatgaaaacggcaaatttcaacttccggttactagttttgaaggagaagtagaagcggtattccagatacgccgtaggggatccaaacataagaaagatgcttctgttatgctcgaccgtaacttcgcccctaccccacgtgccttcagctatgaagaagaacatccacagtggatggacaaaaactcatggatcaccctttccaaccgtatagactcgctatatgtagattctattagcaaaactaacaacacctatttattgagcgaagtggaaatagcaaaaaaaagaaaaaataagaacatcactactcaagtattcgagaaaagcgtagacgcatactatgatgtaacgcgattggttgatgaattacgcgatcagggaatagtaattaatactatacccgacttgcttagtaaagtgaatcctaacttttcatacgatgtgcaagacggaagctcacgatataaagagaaaacaatctgtctcattgttggcaaacaagtacttgatactttaactgcttggacattgtggaatgagatagatggtataaaacagattatgatatgcgaaggaagcaattcgtatactaatgaagtgcttaattcaatacacggttcaaatatgacaaaaggacaaaatgtaaaagacatgatgacagcaatgaatcccccacgtacctttgatgacagtttctatctttatggagatgctgcaaagaaaaaaatatcgttagacgatactgaaaaggccaaatcagaacccctttttagaaagaaatcatcaggaatcaacaataatgtaaacgtcaatatcgatttttcaagattcggacaatatgctttattctacataactccgcattttgactccaattatagcagattaacgcaaaagtcaatgaaggctgcccatggaacacgtcgtacaataatccaaggatattctcgcccattagctttctattctcctgtctacaaagacaaaataccgactgcaaatgtcaaccatcgtcgccgtacactttattggaatcctactatacaaactgacaaaaatggtaaaattagcatagaatgtcagaacggtatgtatgccaatccggtcattatccacgcagaaatgctgaaaggtggaatcccatgcagtattacgattattggagagaagaaaaaaaaataaaccagtaaatatctccaatgtcccttttaggatttcaatttagatgaaataccgccatttccgacaaattccgctaatgatgtcaagggtcggtcaaggataaaaacaatagtgagacaattggaatacatgaaacagatatttaatgaagaacaaataaataaagctgcattcatcatcgaaagccctttatcaaagctttctgagctttatcatagcgaagttaagaatcttgctattttaatgtcttgaactacaagaaaggattaatatctttttgcgaaactggagaatattctctttacactgattacttcttgaataaacaaatcgaaagaataaaagaaatagaagaataaaaaacagccttcctctcaaaacaccatccttatatcatggtattaaccaaaagctgggaacaaagtgggaacattttggattaagagaaaagaaaaaccctctcagagatcatctgaaagggttttatgaggttcctggcgcactacttccagtactaataaccaagaatttagctctataacgggctacaaaaatcaccggacccaaaattaatttctattcggagacaaacattttagttcgaaccaaacttgattttttattgttttttgttcgggaatttcccgcctttaattatcttcatcctgttttacctgcggaattaccaagtaactccagcctagttctcagtgatgcattttccgagaccaacttcctattttcacactccaactctttatttctatcacgcaaaaaaaagattaaactatcattattatgcgtattagacatataatccgtgatttcaggaagttcttccacatacatagtacctttaccggtcatcagccagtctgcactgagacgtggataagcacatagaatacgttctatactatcagaattcattgatgacctattcttcaaagctttattcacaagtccatttgataatttagcgctaacagtcaagctattagcgttcaatttctccattttcataaaagcttcaagacgatctatgaatgcttctttagatattgacatattctccatatcataccattttagaacatttctccactaaaagagaaaatttcttcattttctcattgcttatatagaaatgttctatatatttgcaacgtagtttcaaaatcaatgcaacaaatgtacaacaaaactagaacatgtgcaatagcgaaaaaacgctattcctttaaaaaaggatatctgcaagtctcattagaggaaaaagataagctcaaaaatgacttgaaagtagtactaaataacccttc

SEQ ID NO: 4619 - DNA, 890 bp, Unknown
  gut microbiota DNA sequence
cttgaatttgaaaagaaatattcaaatctagactttgttcccatcattggagatgtccgtgtgaaagaacgtctccgtatggtgttcgaaacttatcagcctcagataatctttcatgccgctgcctataagcatgttccattaatggaggaaaacccttgtgaagctgtactggtcaatgttgtcggctctcgccaggttgctgatatggcagtggaatacggagcagaaaagatgatcatggtctctaccgataaggctgtaaatcctactaatgtaatgggatgctcgaaacgtctggcagaaatctatgtacaaagtctgggctgtgccatccgtgagggaaaagtaaaaggtcgtaccaaatttatcactacccgctttggtaacgttttgggtagtaacggttctgtaattccccgttttaaagaacagattgagaatggtggtcctgtcacagtgactcaccctgatatcattcgtttctttatgactattcccgaagcttgtcgtctggtaatggaagctgctacgatgagtgaaggtaatgagatttttgtttttgagatggggacggctgtgaagattgttgacctggctacccgtatgatcgaacttgccggttatcgtcctggtgaagatattgagattgagtttacgggattgcgtccgggtgagaagctttatgaagaagtattgagtgataaggagaatacaatccctacagaaaataagaagataatgatagcgaaggtacgtcattatgaatatactgatatccttgatacttatggagagttcgagaatttatcccgtacggtaaagatcatggatacagtgaagctaatgaagaaagtggtacctgagtttaaatccaagaactcaccgaa

SEQ ID NO: 4620 - DNA, 485 bp, Unknown
  gut microbiota DNA sequence
ccgctatagctcagttggtagagcaacgcattcgtaacgcgtaggtcgccagttcaagtctggctagcggctctcctaaaaaacgctgattgtcaaataaataatcagcgtttttccctttttaaagccgtcgtgcgaataaaaaaattatttttctcattccctctattccccacatatcataatagaacagatggcatttacctgcaaaaggagtggctaactgaagcagatagctttttatatactcacaaacatatttcaaagcagacttatctctttaattatccgacagttcaaaaaaaactccactgtgtagaacgtatcaataagcagggcattttactcatgtatgatactcaaaaatattttcgtaatttgccaaacacaatatttatttctacatttgaattttaactaattacacaatatcaccaaaatgtaagtatatgagaaaattattattcgccatgttggcatgtaca

SEQ ID NO: 4621 - DNA, 978 bp, Unknown
  gut microbiota DNA sequence
agtgtatgggtgaatgccaagaatgcaggagcatcggacgattatcgctattctcccctattcacggcatacggaaacgagccgtcggcaggatcagagaatatatggccattgtttgtcctgcaatcccgcggactcgcccaaataaactgtaacggatggacagacttcaccgccgcacaaaatgagaaaggtgtcaacaccgtttattgctcggaatatgcagcagatggaatcgtttgtgaggaagactggctgaaggatcatgaatggcatctttacacagccgttctcacgtctaccacctgtaaaatctacattgacggagaagtcgccaactcatggacagtgtcgggcagcggtgacggcaataccatctccggaatattcaccaacggtgcagacttgaaatacatctcattgggcggaaaccaggcatggacatgggctgaccctgatcccggatttatgttcgacgacatcgctatctacaacaaagcactgacaatcgatgagatacaggctattatgaaaaagaaaaagaattaaaccttaaagtttagtatacatgaagaattttatactgatactctgcctcgccacattcagccaatgggtgtatgcgcagaacaagcagatcaccggacgggtagttgataccaaaggcgaagccgccattggtgcaagcatacttgaaaaaggaactacaaacggaaccattaccgactttgacggtaatttcaaactgacggtcggaccgaaagccgtgctacaaatcagttatatcggttataagacacaggaaataccagtagccaacaagacgaaactgaatatcactatggaggaagacacggaagtgctggatgaagtcgtagtggtcggatacggtgcgcagaagaaagaaagtgtggtaggtgccatctcgcaggtttcttccaaagaactgttgaaatctccggcagccaatatttcaca

SEQ ID NO: 4622 - DNA, 3070 bp, Unknown
  gut microbiota DNA sequence
ttgggcgccagcgtcaggtaaatatctgccagcatagccatcgccgcctctttgcaggcacgtcccttgtcattttctccgtaactgctctttgggggaagcatatccaccgcattcttacagtccgatagaatctgcgcatatacctcatccaccgtattgcgggcaatatccgtcgactgtcccggctcaaagggctgtagccgcaaaggtacgccaccataaaggcggacgaggatatagtagtaatgagcacgcaggaaatatgcctcacccatgcaacggtcttttatctcatcggagatggcagccgaaggcagattggaaagcacgatattacaacgtccgatgcctacccacggagaacgccatacgtacagggcaaaaccgttgtcgctctgcgctataaagttagccgcctgaacagtttctagtccgtcggttcctcctccggcacctacctcgctgttgccggcaaggatgtcgaggctccacaggcgctgattatacatattggacgactgcaacgtcttatagcaggcagtagtcagtgctacggcaatctcattggtcacttccgattcggggtccacaccgtatttggggtacttatccagaaaatcactgcacgatgtcaaggcaagtacgacaagtatcattataaaagtcagtttctttttcattttcttcctcctgatttaaaagttaaagttcaagcccatactgaatgtacgcgagatagggtaacggctgctgtctataccgttgacatccacctcggggtcgaagcccgaatatccggtgatagtcgccacattctcgcaagagaaggagatacgggcgttttccagttgaatcttttgcaaccactttttaggcagtgtatacgaaagggtgatatttttcagacggagatacgagccgttttccacaaatcggtcggatacgcggcagttctggttcgggtcgccccagatggcacgcggcatggagtagcttgtgccttctcctgtccagcggttcagtacggctgtagtctggttgtaggcggcagccattccttcgttgtccacattgttggcattataaatcttgttgcctgccactccttgcaggaaaacggagagttcccatcctttgtaagataggttgttggagagtgagaagaaccagttcggattcggattgccaagaatcgtacggtcttcgtcgttaatcactccgtcgttgttcaagtctctgaagcggatgtcccccggagctgtgcccggctgggtggcgtggcggttgacttctccccagttctggaaaagaccgtcggtaacgtatccatagaaaacgttgatcgggtaaccggctttcagcatggtcacgtatgaattgcctatctggttgataaacatcggagtttcgctgttcaggtccagaatctcatttttattgtaggtagccgttaaagcggattcccaggagaagatgcctttcaggttgatggtacgcaatgtcatttccactcctttgttgcgcatcttgccggcattggtgaaagtctcggtagtatcttcaaagcccgaagtgatggggatggaagccttcaccagcatatcgttcgtattcttgatataagcatccagtgaaaggctgacacgcgaatcgaacaggctcatgtccactccgaagttggcctggcgcacttcttcccaatggatgttcggattggagagagtggtagataccaaagcagtggagttattgtttccgaaaggatagacacccgtgttgtaggatgcgacaaatccatagttaccgatttcctgattaccggtcacaccgtatccgacacgcagtttgagatcgttcatcaggaagttatctttcgggaaccagtcttcctgagaaacacgccaagccagagatacggaagggaatgttccccatcggttgttcttaccaaagcgggaagagccgtcacgacgtacggtagccgtcagcaggtatttgtcttcgtatgagtagttgagacgtgccatcagtgaaagcagtgcccagtcgctctggctgccgccaaggctgtacatcttttctccgttgtccatctcatggatattgtcgaacatgaagatgtttttctgtgcgttcagataatcgtagttattccactgtgcggaagaacctgccatcacacctacacggtgtttctttgcaaaagtatgatcgaatacgaagtagttgtcccacaggtaggtgaatgatttgttgtcgcttttgtagcgggaagattcttctaccggattcggtttccagtcgtatgccggcgtgaagttgtcggcaaaccagaacttggcgtcatagccgaaggtacttttcagtttcagccatttagtgaaggtgatctctccggtgatgttcgcgaggaagttatatcctttcgtctcgttagtcatcatgtgaagcgtaccgatcggattgcggatacttccgtaccattgcgcctcctgtccgggaccgctccaactgccgtcgtcattcttcaccggttgggtgggaagggctttcatcgcatcaccgatactgtatgttcctccttcttttacatctgtgctgaatgtgaggttggtggtgaatttcagccatttgttgacttgggcgtcactgttcgcctgaaaattgaaacggcgataattgacactcttcacaatgccggactgatcgagaaaacctccggacacataataatgcgccttttccgtgccgccggaatagctgaccgaataactctgcttcactcccgtgcgcagcatctcgtcgagccagttggttccttttcccaatgaagaagggtctgcccagtaagggttggtgttatcgtcattgtttgagagcatgtcattgctcaatgctgcatattgggcggcattcagcatatcaggcactttagttgcattctgtatcgcccagttcgcattgaccgttacctttccggcgccttcggcaccgcgtttactggtaatcatcactacaccgttggcaccgcgcgaaccgtagatggcagttgccgaagcatctttca

SEQ ID NO: 4623 - DNA, 2562 bp, Unknown
  gut microbiota DNA sequence
cctatacttttataatcaataaaattctccctgttcatcatcaacaaggcagccgaggcaatcaatgccactgacatgggaagcaagccggacatcgctgcttttatgtatttattatccttgcatttcgcaaagaaataggaaatgagcaatacgagaataaaagagggcagacacaccgctacggtagcaagtaccgccccccatacactgtgtgtcactgcatagcccacataagtagcactattaattccaatcggccccggagtcatctgcgaaattgccaccacatccgtaaattgttggggagtcagccaatggtggagatctacaatttcatgctgaatcaacgaaagcatcgcataaccacctccgaaaccaaacgtacctatcttcagatacacccaaagtaactgtaaatatatcatgcctttatatctttaatcttatttttcaaccacagagtatacactaatccaccggaaatccccgccaataccacataaataggagaaagcccgaattgccagatcagtactgtggcaatcacaggagctatcagttgcacatacttcaaatgcaaagctctgaccgcagatatacaaggaaacaaaatcagcgccactacagccggacgtatcccgttaaagatacgaatcatcacctcattgtcctgaaaacgggcaaagaacatggcaatcaacatcataatgacaaatgaagggagaatagtcgccaacgcacaaaccagacttccgctaaccttatgaagtttatatcccacgaaaatggatatatttaccgcaaaaactccgggcaacgattgagtcaaggcaaacatttccataaattcgtccttgctcatccagtttttctttactatttcccgttctatcaaaggaatcatggcatatcccccgccaatggtaaacataccaattttcgcgaatgtacaaaagagttttaaataagtaataatcatgtatttgtcagcgttttatcgaacataattcagattaacaaagatacaaaatcaccttcatataaacaaaaaaaggcggctcctttcggaaccgcccacattttgcattacatatctattgcctaaaaggcttagagtttcggaccagcagcaactaaagccttaccagcttcgttacctgtaaatttagcgaagttcttgatgaaacgtccagccaaatcttttgctttttcttcccattggcaagcacattcgtaagtgtcgcgtgggtcaaggatcttcggatcaacacccggaagttctgtaggaacaacaaagtcgaagtaaggcataaccttagtaggagctttgtcgatagaaccgtcaaggatagcgtcgatgataccacgagtatctttgatagagatacgtttgccagtaccattccaaccagtgttaaccaagtatgccttagcaccagttttttccatcttcttcaccagttcttcaccgtatttagttgggtgcagtgacaagaaagcagcaccgaaacaagccgagaatgtcggagtcggttcagtgataccacgttctgtaccagccaatttagctgtaaaaccagacaagaagtaatatttagtttgttctgcgttcaggatagataccggaggcaatacaccgaatgcgtcagctgacaagaagataacttgtttagcatgaggacctttagacaccggtttaacgatgttttcgatgtgatagataggataagaaacacgagtgttttcagttactgacttgtcagcgaagttgatttcgccttcagcgttaactgtacagttttccaacaaagcatcgcgtttgatagcattccagatgtccggttcgctttctttatccaagttgataactttagcgtagcaaccaccttcgaagttgaatacaccttcgtcatcccatccgtgttcgtcatcaccgatcaacaaacgtttcgggtcagtagacaaagtagtcttacctgtacctgacagaccgaagaagatagctgagctcttgccttctttatcagtgttagcagagcagtgcatagaagccataccgttcaaaggcaataagtagttcatgtaagagaacatacctttcttcatttcaccaccgtaccaagtattcaggataacctggatcttttcagtcaagttgaatacaactgcagtttccgagttcaagcccagttctttgtagttttcaactttagctttagaagcgttcatgataacgaaatcaggttcaccgaagttagccagttcttcagctgtcggacggatgaacatgtttgttacgaagtgagcttgccatgctacttccatgatgaagcgcagtttcaagcgagagttttcgttagctccgcagaaagcgtcaacaacgaacagtcttttgttagaaagttctttagttgccaaatctttcacagctgcccaacatttagcgtcaactggtttgttgtcgtttttgtattcttcagaagtccaccatactgtattttcgctggtttcgtcttttacgaagaatttatctttaggagaacgtcctgtataaacgcc

SEQ ID NO: 4624 - DNA, 9620 bp, Unknown
  gut microbiota DNA sequence
aaagggaggagtaagttatgaatgctcgttggtttgaccggattatttatggcggggcctggaaacagatatgtttcctgattattatagtcatttcgctgattgttctatcttgtctgggagtacactggggaagcaagcatcagatggctccttccgaagagatgactgcgctggctgccgactctgtggcgaaccattctttccagaagaccctgtggaatgtatacaataactttgttgattcgggcaatctgattagtataagtccggaagaccgcccgtgggcattgattattagtttgctgggttccgtcgttttgggcggattgttgatctccacgctttccaatatcattgaaaggcgggtggaaaattgcagaaacgggttgattcattataaactatctgatcattttgtgatcatcggtgcagatgcgatgttgccctgtctgatacgacagttatgccaacgggagaaggattgcacattagtcattcagacttccaaagacgtcaatgaagtacggatggaattattctccaatctcacaaaggacgaggagaagagaatcgttttggttcatgccatgagagactctaaagaagaactgaaaaagttgtatgtggcggatgcgaaagaagtctttatattgggagataacggagagctggatgatgtggaatattatcatgactcgatgaatgtcgactgtctgaatctgataggcgaactttgcaaggaagagaatcggaaacctcctttgaagtgcaacgtactctttgaatatcaatctacttttgccgtcttccaattctcggatattgatgatgatataaaggaatatattgatttctgtccgtttaacttttacgaaacatgggcgcaaaaagtatttgtgcgaaatgcgtgtagtatccgtgagattaattatctgcctttggattatcagcctgtcacttacgaatcagagaaatatgtgcatctggtaattgtgggaatgtcgaggatgggaattgctttggctgtcgaggctgcccatatagcccactatcccaactttatccgggataaaaagaagaaaacgcgcatcacttttatcgataatgaagcaatgcgtgagatgaacagcttcaaacaagcgtatgaaaacctgtttgatgtatcttattctacctttatagacacagaaaacggtttggtccgcagggatgaacctgctgaggtttatgctcatttgggaacagattttatagacatagaatggcagtttgtacagggaactatcgaatcgccggaagtccgtgatttgattacagactggtgtgaagatgaggatgcgctgatgacggttgcagtctgcctgaacctgactcatcagtctatttcttctgctgtctatctcccgcgttgtgtctatgagaaaggtgttccggtgttggttcagcaacggataacatcggctatcattgaaaaattatccggtaatccattgaagggaaaaggaggaaccaatcagcgtttcaagaatcttcgtccgttcgggatgttggatgattgtttcgacttgtgcatggcagacgagatgtatgccaagcgtgtaaatgcggtgtatgaaaagtgtgaaggagataaagtcttgacagaactgccatctgcgaaagaaatggatgaactatggcacaatccgaagttcaaaacggtaaagaaatggtctaatatttataatgcgaatgccattcctaccaaattgcgttcaatcggctacaccaaggaacattgggacaacggaaagcaacttagcgaaaagcaggtggcgattttggcagaggtggaacacaaccgatggaatgtggaagaactgttactgggatatagacctgtgacaaaaaaggaacaggaagagatagaacaaaaggtagccttgaagaataaaaagcgggatgaagaatatgctcattatgacattcgcccttacaacgatttgcggaatggcagtgagaaatatgatattgctttgacacggcatctgcttttgattgcgaagccggacgaaaaactataaaatggattaggatttgtgatatggggaatcatcaaaaggaaatattcttagtgctctctatctttctgattggctttcagtgcgtttgggcacaaaccactcagaagggaattgtcatggaaatgagtagcaataacaagcccgtagccggtgctgaaataaaagtagcgggtgcttcgcctacggacagcgatcaggaagggcggtttattctgaatttcaccgcttccttgccgggcgatccgttgatgattaatgatatctataagaaaggtttcaaaatagtcaattacgagaaagtagccaactggaatatatcgtctgcctccgaactgaaaattgtattagggcgtaccgaagtcatcaatgcgttgcgcaagaaatattacgatataggcgaatccaatagcgagaaagaatatcggaaaacattggctgaactggaagaactgaagaaacagaacgcattgtccgcagtggaatatgatcagaaagttgactccatgtctaaaagtatgatggaatggcagaaacgtctggaaatatatgcgcttaaatttgcctgcatcaatcgtgacgagcttgatgctatggaaaagcaggcaatggaactgctcgatcatggtgatgtgcatggagctattcgtctttatgaagagatgaaactcgattctgccatgacattgaagattgcagtcagacaggaagccaaagaagatatgaaactgcttcttccatccttagtgaataatttccagttgctgaagcaagccgatgataaagtggcgtgtgactctgttgctcacttgatttatgagatggcgacggatatcaagctgaaattaatgtcggtagagtggttctttcagcggaatgacccaagtgaagttctggatcagtatagcttaatcgtaaaggatacgcaaagtatgcaagagattgagctggtggagaatagccttcagcagtcattgaaagaagtaaaactgaaaggagaactgaagaaaaaggcacagttggttttcgaacgaatcgaagaccgcaagaaatggatcagtataaaggaaaaaatatagaaacagatgaagaagatcaagatttttattgcatcatcggcggagttgaatgaagacaaacagatgtttgacttgtacttttcggataagaataaactttatcgtgaccggaatatagacttcgatcagcgtacgtggatggacttcagcagttcgctgaatgaaggtcgtctgcaggatcgctataatgactatatccgcgaatgtgatattgtgatttttctgttccacacacggatggggcgctataccaaagaagaactggaagtggcccatgaaatatatctgaagactaaggctgcaaaacctaaaatatttgtctatttcaaggaggaggggatcgttgatgagtctctcaaagattttaaatcttattgcgagaagaatctcggacacttctgcgacttgtataccaattatgatgatttgcgtctcaagttcgacaaacaattgcagattttggagaatgaaggctttatcaagcccgatccggtagatgtgaaacggacattgaggttcgtattattgtatgtccttgtgcctgtactggtggtggcactggctttctttgctttctattattattcgccggtcacttccacggtgcgtcttacggatacttccaaatcttctttgcctttttatggcgctgatataacattggagtatgccgataagagcgaaacccgtcatgtggacagactttctgacgaggttgtcttcaaagaaattcatactaaatatctgggtgagaatgcccgtctgaagatagaatcgaaaggatatgtgacggtagatacggtactgagcctggaaaagaatgtgactcttggcatcagtcgggattcttcattagcgatgattttcggtactgtgaaagatgaggataaccgtccgctggcggatgctactgttcaagtgctggacatgaagacggtatctgacggaatgggaaacttccaactgcccatacctgccgagaaacaaaaagaggagcaacgggtgacggtatacaaggatggatatcaattatgggacttcaccggaccggtatccgataaagtcccatggaagattattctgagaaagtaatgcctttactttctgtaaatgctattattgttggtccggtaatcattgataaggtagagcagaacggcatcgttaggcagcgtgccgctcttatactccagacctgcttttaataattcctcggagccgggctgggataatttggccagaaggtctcctttggcaaaccggacaacaagagggtaggagctgaaaagctgattgagttctttcagttcgtttgcgatgttttccgcctcttgcagaaatttcagagcctccgcattattgctgttctgatagtaggcgatacttgtattgagagtcatcaatagatagttcgtgccaagttgggctttattatgcggatatagtgtcttgatgatttcgtatgctttcttttgcacttccagtgctttggcatattttttaagtttgccgtatcccaacgacaggttattgtaggtagtggtgatactgcccatcatatccacgtcgttcggcttttgtttcaggtgcttttccctgtctttctttactttttccagatgttccactcctaattcatacagtcctccgcaaaccattgcggtgcctatactgttctctgttctcaagtcctgaaatccccatactccttgcatggtgtataatgcttccaggtcgatggcggctttcagagctttgtcatgttcggaaagttccaggagcatatcgatatacgatgcctgcgcactgataatctcaagaacaaatcttgccggattcaactgattcagtttttcggcatattggtatgcttgttccacatgcttcctttcttcgggtttatttccgtttttggagtaatatagaatgtattgtttctcgatattgtacaataatgaggtcttttgttcttcactgttgatttttaattcgttggctaccttgtcttcaaatgcttttatggtcgtgaggaagttttccggttctgtttctgtgcttacgctgatgtaggcgaagttccataaagcataccagtaggcacgggacaagggacgcatcttatacagtttctcggcttttgccagaatctcttttatactgccggctgccagtttgtaatccgccttctctactgcctgatggaacaggtattcttgtcttcctatttcaacttcgagtatggcttcttcattatctcctgcattctttttatttagttcgaataatttctctgacagttcgttgactttagacacattgccttccttcttgtaaatgtctgtcagcgaactgtatatgttggcaagttgagaactttgaatatttatgaacagctgattgttgctgtctgctatctcttcactgatttctttgatctggtcttcatagatttcctttgcttctttgaattcgttcatggcttcgtatgtctttcccattgaatagaacgtctgatggtagatagcatagtaatcgcccgaaggcatggaaatatttttgttggacagtatttccagtgcgttgatgtcatactccaaggctttgatatagtctttctgatgatgacgcgcaagggtactttttatgttcagtacttgtacgagagatttctcgtcaaatgaaagtttctggcatttgtccagccattccatggtatcactgtcttccagtcctattttctgcaatgcgtatttaaatacgtatgtaaacctgtcgggaagtgcttcggctacgaacttgtaggcatcatttgctttcttctcgttttccattcctccggtcagggcgcagaggtcggcatatcggtacattatttcggccagtttgtcgatgtcttcctctgcttttgttttctgtgacagcttctctctggcctgagtgataattccggatttattgtatagctcgatggcttcagacagttttccggcattgaccagttccaatacttgcttctcaatggcgttgatgtcatctggatttattcttgcaaacttctcagcgtactgatcgatctgattcataaatgatctggattcctccgccatcgctttcagacggtcgctgcgctcttgcagactgattttctgtgctatatatagctggttgatttcttcaatggcttttttcttgtttcttcgaaaagtgggcaacggagatggaataatacttgttcttgctttcttctatagtgccttcgggagccatcacaatgctcaacggacgtttttcggatagaatccacccgttgatcatgtctttattcaccagttcatatcctttcttatatacattcggagaagcgatagccattcccggtttctgtttgctgaagttgaactggaaattcccgttggcatccgtatcggtggcaggggcatcggtagctgtcagttgtactcccggtagtggggacttatttgaattaaaaatctgtactgtacctttttgagacatttgtgcgtaagcacttccggatagtaataagaatatccagaaacaggcgtttttggttttcatagcttttatttcttaatgatgtatatgcaagtcaacaaaaggaatgtggagggagaaagtaatcgggactgactaaaaagtctgaaagctgattatatcctttttagtcagccccgggtatattggtagggagtcaggatcagttgtgtactactgttcctatttcttctccgctgattacttttttgaggtttcctaccgtgtccatgtcaaaaacaacaatcggcaggttgttttccttgcacatacaggtagctgtgaggtccatcactttcagaccacgtttcagtacttcatcgtatgtgatatcactgaattttgtagctgtagggtctttctccgggtcggctgtgtagatgccgtctacgcgggtacctttcagcattacgtctgcttcgatttcgatgccgcgcagtgaagagccggtgtctgtggtaaagaaaggatttcccgtaccgccggacatgataacgatttcaccgttttccatgcattcaatcgctttccatttgctgtagaattcaccgatcggctccatgcggactgctgtaagtacacgggcctttactccggctgctactaatgcggaacttaatgcaaggctgttgatgacagttgccagcatacccatctgatcacctttcacacggtcgaagcccttgttggctccgcttagtccacggaagatatttccgccgccgataacgatgccgatttgtactccctgttcatggatttctttgatttgtgcggcatattccgccagtcttttttcgtcaatgccgtattgtttttcccccatcaggctttctccgctgagcttcagcagaattcttttatactttgccatatctttttacatttagtttagcgcaaatatagagataatttgttggatagacctcatagttgcgcgataacttttatatcgctttcttcactatttctcttccgatgaaggtctgcacgattcccctcaatgaaaggtaagtgatgaaagccagccataaagcgtgatttcccaagagattgtggaaggcatagtagatcataaaaaagctgacggaagcaaccaacatcgaataaagcatctggcgggtggcggtggcgccgataaacacaccatcccataagaaagcggagaaacctgtcaatgggatggcgagtgcccaataaaagtaagtgtctgaggagcttattaccgaaacatcatttgtcagtaacccgagaaattcttttccgcctattgcatataaaagggtgaatgctgccgaaagtccgatgccccaatagaaaaggtgattgaccgtattgcggagagccgtttgatttcttgcgccgatatagcgtccggctaacgcttcccctgcataggcgaatccatccataatataagagaagagcgtgaacaattgcatcagcagtgtatttactgccagaacgacttctccctgtgcagctcctgcagaggtgaagaacatcgttacgattaccaggcagagggtacggaaaaagatgtcacggtttacccggaagaaacggtacattgcctgcttctgtatgatatctttccatacaatacgttttcggagcgtgctgtaataacgcatatacaatagtatggccataaagaaacctgcatactgtgcgataagggttccggcggcgactcctgccactttcatatccaagagatagacgaaagacaaactggcgataatattgacaatattctgcgtgatggcaatatacatcgggaagcgtgagttctgcattccgataaaccagcctgcaaatccataaagacctagcattgccggagctccccaaatacagatatagaaataggtagttgccagttgctttacttcttctgtagtctgtatgagtgtgaatgccgcattaaggataggatattgaaggatcagcaggcatagggcaataaagagtccgacaccgacagaacgtatcagtaaccggttgatttcgtttaagtcatgctgcccgtaggcttgtgaggtcatgccgcttgttcccatacgtaggaatccgaagatccagtagatgatattgaacaacattcctcctacggcaatcgctccgatatatgccggagagccgagatgtccaacgatagtgacatcgataagtcccagcaatggcacggtaatattcgaaataatcgatggtacggcaatctgtaatattcgtctgttttcggaggtcgtctttttatttatcatcttgtagaaacacttttatcaaatagattgttctttttgcgaacaaaggtacatattttattattttattgtatctttgcgtgtcacgaactagaaacaatgtaactgattatgaaaaccttaactctccttcttttttctttgttttcgttgccgctgatgctgaatgcacagacggccgatgaaatgttgcataaagtcacggctgctattgaggctggacagcatggacaggcggttagctatttccgtcaggctatcagtctgaatatagaccgctcggaaatgttctattggacgagtatagacaagagtagtgagatcagctcgaaactttctaatgagttggctcttgcctataagaagaatcggaattatgacaaagcctttttgttttataaagaactgtcgcagaaggaccctgataatgtagattatctggaggctgttgccgaaatgcaggtatgtcgtggacaggagaaggatgcgttgcgtatgtacgagaatatattgaagttggatgcggataatttggcagccaatatttttctcggtaattattattatctgatggcggagcaggagaagaaaaaactggaaagtgactacaaaaagctttcttcaccgacaaaaatgcaatatgcacgttatcggga

SEQ ID NO: 4625 - DNA, 6193 bp, Unknown
  gut microbiota DNA sequence
gttttctccacagtagcagtatcgggaaacaggatgattgtttgcgactttgcgggtaatgtttattgcctgtcgtcaaaagcggcagaagaataaagtacatcccgcctcacgcagttttctccacccgcagcgttgtaatttaaagattatcacgtatctttgcccctcaatcataaatacgagatatggctattacaatcaagaaagtctctacaaagagagaacttaagaagtttattcgctttaattacaggatgtataagggcaatccatattccgtgcccgacctttacgacgatatgctcaacacattcaacaaaaagaagaatgcggcattcgagttctgtgaagcagattacttcctggcataccgggacgacaaaatcgtaggtcgtgtggccgctatcatcaataaccgcgccaacgaaaagtgggaatgcaagaacgtccgtttcggatggatagatttcattgatgaccccgaagtatcatccgcactcatcaagaccgtcgaagactggggaaaagagcgcggcatgacccacatcacaggtcctctgggattcaccgatttcgatgcggaaggaatgctgatcgaaggattcgaccagctcagcacaatggctactatctacaaccacccgtattaccccgtacacatggagagactcggtttcgagaaagacgccgactgggtggaatacaaaatctacatccccgatgccatccccgacaagcacaagcgtatctccgaactgattcaacgaaaatacaacctgaagataaagaaatacacctccggaagaaaaatagccaaagactacggacaggaaatcttcgaactgatgaacgaagcatacagcccgctctacggctactccccgctgacgcaacggcaaatcaaccagtacgtaaagatgtatctcccgattctcgacttacggatggttaccctcattaccgacgccgacgacaagctggtatgcgtaggcatctccatgccgtctcttgccgaggccctgcaaaagtcacacggccgtctgctccctctaggatggttctatctgctgaaagcattgttcatgaaacgccgtgccaaaatgcttgacctgctgcttgtagcagtcaaaccggagtaccagaataaaggtgttaacgctttgttattttccgatttaattccggtttatcaaaaattaggttttatctttgcggaaagcaaccccgaactggaactgaacggaaaagttcaggcacaatgggattactttgagactaagcaacataagcgccgccgtgcgttcaccaaagagattaaataacagctatggaagagaacgaattgatatctgtagacaacaacaatgcagtagagtacactgacgacaacatccgccacctgagcgacatggaacatgtgcgcacacgccccggtatgtacatcggtaggctgggcgatggcgcgcacgccgaagacggaatctatgtcctcctcaaagaagtcattgacaacagtatcgacgagttcaagatgcaagccggtaagaaaatcgaaattaccgttgaagagaacctccgcgtcagcgtacgcgactacggacgaggcatcccgcagggaaagctggtagaagccgtaagcgtactgaacacgggtggtaaatacgacagcaaggcatttaagaaaagcgtcggactgaacggtgtcggtgtgaaagccgtcaacgcattgagctctcgttttgaagtacgcagttaccgtgacggtaaagtgcgtatcgccacattctccaaaggaaacctgcagaccgacgtgacgcaggacaccgaagaggacaacggaacctttatcttcttcgaaccggacaatacgctgttcgtcaactactgcttcaagcccgaatttatcgagaccatgttgcgtaactatacgtacctcaacacgggactcgccatcatttacaacggtcaccgcatcctgtcgcgcaacggtctggtagacctgctgaacgacaacatgacggcaaccggcctctatcccatcgtccacctgaaaggagaagacatcgaaatcgccttcactcacaccggacagtacggagaagagtattactccttcgtcaacggtcagcacaccacacaggggggtacccatcagagtgctttcaaagaacatatcgcccgtaccatcaaagagttcttcaacaagaacatggactataccgacatccgtaacggactggttgccgccatcgccgtcaatgtggaagagccgatcttcgaaagccagaccaaaacgaaactgggatctaccaacatgactcccggcggcgtgacagtcaacaaatacgtaggcgacttcatcaaactggaagtggacaacttcctgcacaaaaacgcggacgtagcggaagtaatgcagcaaaagatacaggaatcggaaaaggaacggaaagccatcgcaggcgtcacgaagctggcacgcgaacgtgccaagaaggccaacctgcacaaccgcaagttgcgcgactgccgcatccacctcaacgacccgaaagggaaaggaatggaagaagactcctgcatcttcatcaccgagggagactcggcgagcggttccatcaccaaaagccgcgacgtaaacactcaggcagtattcagccttcgcggtaaaccgctgaactcgttcggactgacgaaaaaggtagtctacgaaaacgaagagttcaacctgctgcaagctgcgttaaatatagaagacggcatagaaggactccgttacaacaaagtgatcgttgccaccgatgccgatgtggacggtatgcacatccgcctgctgctcatcacgttcttcctgcaattcttccccgacctcatcaagaaaggtcacgtatatattctgcaaacgccgttattccgcgtgcgcaacaagaagaaaacggtgtactgctacagcgaggacgaacgggtgaacgccatcaacgaactaagccccaacccggaaatcacccgattcaagggactgggagaaatatcaccggacgaattcaagcactttatcggcaaggatatgcgcctggaacaagtgacattgcgtaagacagatgccgtaaaagaactcctggagttctacatgggcaagaatacaatggaacgacagaactttattatagacaatctggttatagaagaagacttggcatcatgagaaaagcaatatttccgggtacattcgaccccttcaccatcggtcattattcggtagtggaacgtgcactcacctttatggacgagataatcatcgggatcggtatcaacgaaaacaagaatacctatttccccatcgagaaaagagaagaaatgatccggaatctctacaaggacaatccccgcatcaaagtgatgtcttacgactgtctgacgatagactttgcccaacaggtagaagcacaattcatcgttcgcggtatccgcacggtcaaggatttcgagtatgaggaaacgattgccgacattaaccgcaaactggcgggcatcgaaaccatcctgctcttcacagaaccggaactgacctgcgtcagctcaacgattgtacgtgagctgctgacttacaacaaagatatcagccagtttatccccgaaggaatggagataaattgaaagtcggtagtatctctattgaggctgactttaaagtcagcctcaggggaatgaagatagtttggataacgcaaaggtaacttgcgaaacttgaaataataattaatgatgatgaagaagattaaagtatacgccctcctggtttgtctgttggcaacgtctgctgtacaagcccaaagtttcggctccgccgccatgcgcaaactccaaatggcggaattcgcgatttccaacttctacgtagacaaagtagatgaagacaaaatggtagaagaagctatcatcaagatgctggcacagctcgacccgcactccacttactcggatgccgaagaagtgaagaagatgaacgaaccgcttcaaggcaacttcgaaggcatcggcgtacagttccagatgatcgaggacaccctgctggtcgtacaacccgtcagcaacggcccctccgagaaagtgggcatccttgccggcgaccgcatcattgccgtcaacgactccgccatcgcaggagtaaaaatgagcacggaagatatcatgaagcgcctgcgtggcccgaaaggttcgaaagtcaacctgaccatcgtccgccgtggagtacaagacccgctcgtgttcaccgtgaaaagagataagatacctatcctgagtctcgacgcttcctacatgattcagccaaagatcggatacatccgcgtcaaccgctttggcgcaaccaccgccgaagaattcaagaaggcaatgaaaggcctgcaacagcaaggcatgaaagacctcatcctcgacttgcaaggcaacggcggaggatatctgaacgccgccatcgaccttgccaacgaattcctcggacagaaggaactgattgtttacaccgaaggccggaccgcacagcgcagcgagttcttcgccaaaggaaacggagagttccgtgacggccgcctcatcgtactggtagacgaatacaccgcttccgccagcgaaatcgtgagcggcgcagtgcaggactgggacagaggtatcatcgtaggccgacgttctttcggcaaaggactggtgcaacgtcctatcgacctgccggacggctccatgatccgactgaccattgcacggtactacacccctgccggtcgttgcatccaaaagccttatgacagctcgaccgattacaataaagacctgatagaccgcttcaaccacggagaactgatgaatgccgacagcatccacttccccgactcattgaaagtgcagaccaagaaactgaaacgtaccgtctacggcggaggtggcatcatgccggactacttcgttccgattgatacgacactctacacggactatcaccggaaactggtcggcaaaggagtcatcatcaaattcacaatgaaattcatcgaagaccaccgcaaggaactggccgataaatataagaagttcgacagcttcaacgaaaagtttgttattgacgacgatatgctcgccaccctccgcgaaatgggtgagaaagaaggggtgaagtttaacgaagagcagtatcagaaggcacttccgctgatcaagacacagctcaaagcactgatagcccgtgacctctgggatatgaacgaatatttccgcgtcatgaatacaacgaacgaaagcgtgcagaaagcattggaaatcctccgttcgggagagtatcagaagaagttgaaataaacatcgaaaaataaaacggataaaccgtacccgatcagacaccttggttgtagtataagtaaaatcattaaaacagaagtatgatacgacagtttggttttacttggacagcaatcagctggttactgatgggatacggtttattttttgccctttcccctttgcaggcgcagaccgccatcaagaaattctcactagagctaaagaacgaaagcctgcccgaagcactgaagcagttggaaaaggcaggaggaaaaaacatcctcttcacctacaacggaacagaaagttatcgggtgaccgtcagcatccgcgaaaagacggaacgcgaagccatcgaccttgtactggccggcaaacccttcctttgcatcgaacgggaagagtatttcgtcgtgcagcggaagaagtcggacaaagccatcgccatagaaggcaaagtatatgacgaaaaaggagtccccctgccctttgtcaacattctcgcccttgccgccgattccagtttccttgccggaagcgtgaccgaagaagacggctccttccatctgcccccggtagcgggagaagactgtctgctgaaagcgacctacataggatatcgcccgcaaatcatcccctgccggcaacaaaacaccatccgcctgcaacccgacacagagctactgaaagaagtagtcatcaccgcctcccgcccgctgatagaacgcaaagacggaacactgacagccaacatagccggaacgcccctttcactgatgggatcggccaaagaaatgatctcccacctcccttttgtcaccggctcggacggagaatttaccgtactgggcagagg

SEQ ID NO: 4626 - DNA, 19127 bp, Unknown
  gut microbiota DNA sequence
agcaaactggataactggacatacaataaatcattgcagaaaatcattgaatctctgcgtgtagataaagagacgaaagacatcatccgttctatgaaaagagcaggataaaaaagcggtggatgacaaacgatgcccggatttaaccgtatcattcgtttatcatccaccgcttattaccgggtgtttttaacttaccgcttcacattcttttttctctttcttctgcttctgcgattttgttgtttccgacggctgtagcgttgccatctcttataaatcatccatccgctcatcaaagctacgacaacaaaaatcagaatagtaatacctacccccagattgtcacctttgatgcgtgaccagatatccagtacctctttggttttatctccgaagtcacgaatcatagcgcagcgttccactaccttacggtcgggatattgaatcttgtcaatctgtatgctgtcggcatccggaccgaagaaataacttaaatccgcataataatccagagtcgtatccactttctcttccagaatctccggtgtagcgatagaactcacatatccacagaaatccatattacgcaacgcaatgtccggacggcacataaagttgataaagtagctggcagccaccggattcttcgcatatttaggaatcacccagccatcataccagatattacttccttctttcggaaccacgtagtcaaggtccactcctaccgcattcgcctcttcaatcgcccatatcgcatcgccactccaggtcatattcagccatgctttattcttcgtcatcatctccttaccgaagtccgcttcccaaccggcaatattcggtttcatggctttcagatacttttcagctatctccatagcacgtggtgagtaatcattcatcaggtcttccaccgacaccgttccttcttccagctctttggcatgggcatagataacggctgttccgtaagcatcacggtagctgtctttcatcagaatctttcctgcatatttcttatcccaaagacattcccaggagaaagcgtcggaatcgggaacgtatgcccggttataaagaatacctgcggtcccccacatataacagacagcgtaacggcttgcttcttcacccggctgactcagtttattaatctgttcgcgaataaatggtgacacattattcatgtaattaggggaatgggcgaaagtggtgtcaataggcaacaacagatgctttttcagcattctctcaatgatatattccgaaggacaaaccacatcaaaatcctcatgtcccttttctattttcgtcaacatgatctcgttgatgtcgaatgtctgatagacgatgcgtatatcttcacctgtctgttctttatagtacgcctggaaatcttcgagtacaccttctcctatataatctgcccagttatagatcttaagaactctctcccgtggttcgccggaattgtagcaaccgctcagaaaaccagccagcaccagcaaaaacaagttaacagcaactattcttttcattttatttacgtagcagtacatgttcatgattctttcttcttcgtttttccggcacggtaattaattactatcagtaaagccagtaccaccacaaaaataatggcggacaacgggcggagctcgggaatcagacctcccttgcgggcatcggcatagatataggtggaaagcgtttccagcccttgattaccgatggtaaatacagttacggcaaaatcatcgattgaaagtgtcagtgcaagcataaagccactgatcattcccggacgaatctccggaatgattactttccgcaaagcctgcataggtgtagctcccaaatcgagggcagcttcataaatgttcggattcatttgtttcaggcgcggcagaacgcttaatacgacgtaaggagtacaaaaagtgatgtgcgccagtaccactgtggtatatccctgcgtgattccgagagatacgaataaaaggaaaagcgatataccggttatgatatcaccgttcagaataggaatactattcacaaaaccaatcgccttgcgcgagcgtgcttttaagttgaagatgccgatggcagcaatgctgcccaacaaggtagatgccgtggcagccagcagcgcaatggtaatggtattaactagggcattcatcagagaatgatgggcacctgtattaaacagtgatgaataaagtttggtcgaaaacccggtccagttacctaataccttcgcctcggtaaaagaataaatcacaatgatcacaataggggaatatagcaacagcagcaatacccacaggtaagtctgagcgaatatcttctttaccatagcccacctccttcgttcgtattatccttatcatcggtactgaacagtgaagtcgcggctatcagcagcagcatgatcagcgaaagtgctgccccatagttccacatactgttattgatattctcctgaatggtagtaccaaagagtttgatattgttcatcgtcagcagttcggcaatggcgaatgtcgaaatggtcggcataaacaccatcatgataccgctcatgactcccggcatggaaagtgggagaactgccttgaaaaagacctgtacaggattagcccccaagtcctgcgctgcctcaatgtagctatggtccatcttctgcaatgtgttatagatgggatagatcatgaaggggataaagttgtaaaccataccgaagatcagtgctccctctcccagcggaacgctgaaaaagtcgaataaagcgacagtggcaagagtacgcaccagaatattcacccacatgggcaggataaacagcaccaccatcgttttggaacggttcagcttgctgttgcttaatatccaggctgcgggatatcccagcaggatacagataagagtcgtaataatggcaatacctatggaatagacgaaggtattgatagcttcgggatgttcgaagaatttctgaaaattggcgagtgtcagatgcccgttatcatcggtaaacgcatacacgacaattagaaccaacggtatgaccacaaagatcgccgagaaaataatgtaaggaagagtccagctcttacgtgatgacaaaaatactataaacttcttattcacttcctttcctgttaatcggttattttaattacacgaatcgcatccggagggatagtaatacccacacggtctccgtcatcccagacatcgttcgtatccacaaacacattctcgtcccagtcagaccatacagtcaggtggtaatgatcacctttataaaggatgaacttcacttctcccgtcagtgtaccgtcttcttcgttatcctgcaggatcactttatcaaagtctacttcgaccttgacatccgtaccggattccattccttccacagaggcacattcgaacgtacagccaaggaattctacatgagtagcatcctgcaactttccttcaaacgtattgcatacacgttctttcttcataatatgaatatcgaacggcttcaccagcagaccaacctccgcaccgacttcaaaatgatgataatcctgaacaaggaactcatatccgccacaaagcacagtcatttcatagtgtacccctttgaagatcgaagtctgtaccacgccagtcagttgcgccatctccgaaaccgggaaaatataaaggtcttccggacggatgactacgtccaccggagtattttcaccgaaaccttcgtccacgcattcaaactccgtaccacaaaagcgtaccagtttatcatgaatcatcgttccgttgagaatattactttctccgataaaatccgccacaaatgaattgatcggctcattgtagatatcaatcggcgtaccgatctgctggatttttccttcgctcatcacgacaatcgtatcactcaatgtcaaggcttcctcctgatcatgagttacgtatacaaatgtaatgcccagagatttatgcatttctttcagttccatctgcatatccttgcgcattttaaggtcgagtgcagccaacggttcgtcgagcagcaacacttccggctcattgacaatggcacgggcaatagctacacgctgttgctggccaccggaaagagaatctacatcccgatactcgtaatctgtcataccaaccatcttcaatgcggctttcaccttcttgccgattgtctgtttcggcgtctttttcagcttcaggccgaaagcaatattgtcgtatacattcaaatgcgggaacagggcatatttctgaaataccgtgttcaccggacgtttatggggtggagtctgtgtgatttccttacccgatattcggatttcgccttccgaagctgtctgaaaaccggcaatgagacgcaacaatgtcgtttttccgcagccggaaggtccgagaatcgtaacaaactcgccctttttcacgttcagagttacatcatccaaagctgttttgtcgccaaaaaacttcgatacatggctaacctcaatgatggatttgtcttcttgcatattcatactaaaagtttgggctgcaaaggtacacatttctacgatttccacctacgtgttaatctaatataacagtgtttttcgatgccagacagaaaaaaaatctatctttgcataaatatttattcactaattttacaaaagcatgaaaaagttaacttatttagttattgcgacggcagcgttgggtatggtagcttgtaccggaaacaaagccggatacgttatcacaggtacagtagaaggcgctgctgacggcgacactgtttaccttcaggaagcaacaggcagaaatcttacaaaactagataccgcagtcatctctaaaggtacttttaccttcgaaggcacgcaggattctgtagtaaaccgttatgtcacttgcgaagtgaacggagaacctctgatgattgatttcttcctcgaaaacggcaaaataaacattgcactgacaaaggacaatgattctgcaaccggtacttcaaacaatgacgcttaccaagctatcagaactcaaatcaatgatatcagccaaaagatgaacgctatctacgaagcgatgggagactcttctttgagtgacgagcagaaagaagccaagcaaaaagaaggtgcccggctggaggaagaatatgataaagtaatcaaagaaggtgtacagaaaaatatcaccaacccggtaggtgtattcttgttcaaacagactttctacaataactctactgaagagaatgcagctttgctggaacaaatcccggctaatttccagaatgacgaaacaatcgtaaaagttaaggaacagactgaaaaacaaaagaagactgccgtaggtactaagttcattgacttcgaaatgcagactccggaaggaaaaactgtgaaactgtctgattacgcagggaaaggtaaagtggtactggtagacttctgggctagctggtgtggtccttgccgtcgtgaaatgcctaacctggtagaagcttacgctcagtacaaaggcaaaaacttcgaaatcgtcggtgtatctcttgatcaggatgctgctgcatggaaagagtctattaaaaaactgaatatgacctggccgcaaatgtctgacctaaagttctggcagagtgaaggcgcacagctttatgcagtgaacagcattcctcacactgttctgattgatggcgacggtactatcattgcccgtggtcttcatggagaaggtcttcaggctaaattggcagaagtagtcaaataaatgaagctgataagagacttcacctaatgaagtaacacttgtgccataccgttgtcacacttgtgccaccatattggcacagttatgccacgccgttggcacagttgtgccaataggatggcacaacatccgacaaggtatcttattcctgttaacgcagtaggtaaatctgatccaagtacaggcacttttgccgaaaatactgatcttatccacaccgttacattgagatataaaaagatagcccctgcaatttcgatcgctcgaattgcaggggcttcttttatatagggacgtcaagcagggaagcgtcacttccctacttcgtcaagctatcagataaaccaacgcacgtagcagaagtcctgacggtgcggaagttccggattcttcgggaacatacggtaagacaccttgaagctaccggcatttgacaggctatgtttaacctggaatgtgtaaaggtcgccttctttcttgataacgctgaacggttctacagagtaaacgtgttgtttaccatccgcagttgtataagtagttaccagttcaagccctatagcatcattcaagcctttttcatcgattacgtaagtaatagtatattcttttccgctttcgatatcaccggctttcaaatcttccagcttgtcgcaagatacgatttcgatagaatcccacttggcaacgacttcttctttccatgcagcaatttcttttgcttttgcattgtcattagcagacagcatatggaaacgttttgccaacttattgtagaacttattgtagtagtcgtccaactggcgtttcatcgtatagtgaggagcgatctgagcgatagaattcttcactaccttgatccagccttctgagtagcctttcttgttacgagcatagtacaacggcaggatttctgtttcaagaatgctgtagatagtagcagcatccaactgatcctgatgttcctgattctgatatgtacgtttttcagtcaacgcccaacctgcaccttcacggtaaccttccagccaccatccgtctaatacagagaagttgacaacaccgttcatcaaagccttttcaccagatgtaccggatgcttccaacggacgagtcggagtattcaaccaaatatcaacaccggaaaccagacgacgtgccaactgcatatcgtagttttcgaggaagatgatcttacccaggaattccggacgacgggagatttcgataatacgtttgatcagcccctgtcctgctccatcgtgcgggtgagccttacctgtaaacaggaactgtaccggatagtcaggattgttcacaatcttagaaagacgttccagatcagtaaacagcaggtgcgcacgtttgtaagtagcaaaacgacgaccgaaaccgatcagcaatgcattcggattgatcttatccatcaatgaaacgatacgtgaaggatctccctgattcttcagccatgtatcacggaatgacttgcggatataatctaccagcttgttcttcatcgtcatacgagtcttccagatctcttcatcgggcacattatagattgcttcccaaatcttaggattcgactggtcgaaccagaagttttcattgaaatatttaaagtacagttctttccactccgtagcactccatgtagggaagtgaacaccgttagtcacataacctacgtgcatttcttcggggaagtaacctttccagatagtagagaacatctcctgagatacttttccatgcagccagcttacaccgtttacttcctgagcagtgttgcaagcaaatactgacatgcagaaacgttcgcccttatcccccggattattacgtccaaggtccatcaggtcatcccagctgatacccattcttgcagggtaaccgcccatgtatttaccgaacaaaccttcgtcgaagtagtcgtgaccggcaggaaccggagtatgaactgtataaagagaagaagcgcgaaccagctcgatagcctgatcaaatgtcagtccggtagctacatagtcgcagatacgctgaacattgatcaatgcagcgtgtccttcgttacaatgataaacgtcttttttgatgcccaatgctttcagtgtcaggataccaccgatacccaacaggatttcctgtttcagacggttttcccagtcgccaccataaagctggtgagtaataggacggtcgaattcgctgttcatttcattatccgtatccaacagatataaagaaatacgtcctacgtttacgcgccatacgttagcatgtacataatagtccagataaggaacatccactaccaacggctgaccattcgcatccatcactcggtcgataggaagctgaccgaagttttgtgcttcatagttagcaatctgctgaccgtccatagacaacgtttgagtaaagtagccgtaacggtacaagaaacctactgcacaaagatctacattgctgtcagaagcttctttcaggtagtcgccagccaatacacccaaaccaccggaatatattttcaggacgctgcttaaaccatattccatgctgaaataggctacagacggacgattctcatccggcttcacatccagataatctctgaattttgtataaacatcattcattcttctcagaattaccttgtcttttgccaaagcttccagcttctcatagctcatacgttccagcaacaacacaggattctgtccacattctttccaaagttccggatctagatctctaaatagttctgtcgcttcaaaattccatgcccaccagatgttgcgtgaaatttcggacaatttctccaactcagcagggatacgtgatttcactgtaacctctttccagttcggagtattcacattactaactttaattttcataatgtttttgtttacttattgatgaataaaatgtttttttagcttaactgacgcttcagagcattgcgcagagcaatgtcataagcctcataataatattgaatgaagtgcttccacagtgcctgctctgcaacatctgccgcacgtttgcggatttccttcacttctttttccgatttatccgcaaagagcgtaatcgtatccttgataccatccgccacttccgaatcattatagtccgaacgatgcagcacttctactccatcattgatgccatgctgattcttcagactgttcacccaaaggccaaagcctgccagatcagtagtaattgtaggtacacggaacgctacactttccaaaggagtatatccccaaggttcgtaataggaagcataaacgctcaaatcctgtcccagcaatatatcataatactctttgttcataataccatcacgaccgtccagatagcaaggtacgaaaatcacctttactttatcttcgggacgattgcccattcctaaatacttcagcatatccaatacctggtcatgcgtcatattgtgcagccagtgagtgatgaaaggaacttcaagcggtgtgtcgaacttttctttgcttttcaatcgcgcctgcaagtcctcacggggatctcccacccaaccgggtacattgatgaatgccaatacattcttatgcaggtttttatctctgttcaggcggttcaatgactccagaaagacatcgatccccttgttcttgaattcataacgaccactggtaccgatgattaacgtatcatcatccagatttgttcccaacaatttattggctacgttcaacattaatgagcgcgcacgcttacgttttccggtaaatgtattgcctttgggtacgaaatcgtcttcgaaaccgttcatcagtactacatctgccggtttgtcgagcaattccttgcactcgttattggtgatttcacttactgtcgtaaaacagtctacatgatgcgccgtctgcttctcgatggaatgcttcgactgcatattcaattcctgtgccatctgatcgccattatacgcaaacagatagtcatacagcggcttatgattgccggctatcgaacgtccgatggaagtagcgtgggttgtaaaaatagtagcaacttcggggacagcttcctgtacataaagtgctcccattccggtcatccattcatgtgcctgatataccaccttatccgtttctgtcaggttgtagcggtagaaactttctactactcttccagcagcgtacgaaaacatagaagcctcgtcgtaatcgccataagcgtgcaacgagtctacttgaaaacgattccacatttctgtgtatatatcgttcttcttttcaaaaaaaggttggaaatcaacaagaatgacaatgggttcaccgggtatattccatcgtcctatacggacggaaagatgatcgttttcaagtgcatgcgttttccaggcagcgcacagattatccgactcgatgaatagagggttctcttttccttgccacacatcaggacctatgaaaaaaattctgtcgcggaatttttcctgcaatgtattcgcccgtgtcgacaatacggtgtatatccctcccactttattacatacttcccagctggactcgaagatataatcgggggttaataaatcttttaccatataatatattaaaactctttttagtatgcgagtgcaaaagtacgcattattctttgaaaaataatactttatgcgaaaaatatgagttaataagaggaaagaaaggttagcccgccatgaaaaaagaatatccccttgcgaacgcaaagctgcattcacaaggggattgaaagatctttattaaaaaattttttccttgaaaaatttacgcaagtgcactaccgatcaagaaagtggcagccaaagcaacgatagcgtaaagttccgggaatacggcaagaatcaatgtattactaaacacgttgtgtccctggccgatagcagcgataccgtttgcacaaacctgtccctgacggatagccgagaacaaggctaccaatcccaaagcgatacctgcaccgagaactgccgatgcctggatagcagtgatttcaggagtcaggataccgaagatagtctggaacataaagtaaccggcaaaaccgtacagaccctgtgtacccggaagcgcagtcaataccaggaagttaccgaatgcactatcattctttttcaatgcgccgatagcagcgttacctgcaatagttactccgtaagcactaccaatgcctgacaaaccaaccataaccgcgatgccaatgtaggcaataaacaaattcatttccataatcttattctatttttattgtttaattcttagtttattatttctcaatgttttattctaaatttctaaaaggcttatactccttgccgcctccttcataaccggagttcttgaagaactctacaaatgtcagacgcatcgggtgaaccattgcaccaagcacattcataaagatgttgattgcatgaccgatcacaaagatcagcaccattacgataggaccggcaatcacgttatccggactcatacctactgccagactgttgaacactcccgccagaatacctccggaaagtccgagggcaaacaaacgaacgtaggacaaaacatctcccagcagaccggtagccatgttatatgaatcccacaaaccaagtccgatattcatgaatatgttctttcccggactgttatagaggaatatcatcgcaccggagatacccagaataaccaaatgcactgtacctcccattggcagtacattcggcaacaaagccgaaacagccattgaaaccaacaggataatccatccgatcgttgccactgcatatttgaaaccaaactgaatcgtctgattgactgcttttagcaccataccgaacaaaatctgaatagcacccaaaatcaatgataactggaacatatcgttgttatccatcagcaccgcgtgtttcagacgttgcacgataggccagtccagatcataaatgttcgctccgaagaatgtacccgtcagcaacccgcagaagaaagttgaaacagccaatacttgtatcagcgaaagaatcgacttcattgacggagtcaccttctttgccagtaagcgatatgccgtagctccaaggaacaggaaaagtccatatccggaatctcccagacagagtccgaagaagatcataaagaacggggcgaagaacggtgtcaggtccagttcattatacttcggaagcatatacagtttacagatcggttcaaaccaggcaaagaatcccttattattcaatcggatagggacattatcacccggcatcggatcggtaatctcataatatacatgtgcgtcattcaaataggcttctatctccactttactataggcaggagcccatccttcaatcaacatcagtttatcaccggcagcctgttcagaactcaatactactttcgagaattcaatctgtccctgcaactccctcaaagcgaccttcaaagaaggtacatctgtttcagaaagtgctaccagtttcttttcgttctcttcaatagcctgctccgttgtattgtacaacgtttcaagatgtgccagcgaataggcgggaagttttgcctgttctacgtccagatccacttcctgacctgctttagtgacggtcacaaagaatactttggaagaaatacgatttatgatcatcgcattgtattccatctcccattcttgctggtagtttccttccgaacagctatagaaaccgattacatagccggcatctttcaacttccggacacttgccggatcgaagttgccccatgcctgcaatgcttccttttctttggcatagccctgcaattgctgagacaatttgccgtgttcagtctgcaaagcatctacttcatccaatacctgcaaaccacgagcagctgtccctccttccgttgcgaccacagcatctttctcatgcttctgattctgaagcaatttcagagtagctgtcagacggttggaaagacggatattctcttgcagttccgtattgtcggcagcaccttgctgtttctccacgatatggactacaccaagttcgcgcagactgttcaggaattcttcgtattccttatgataaaccaggaatgtgagtttcttcatttttgtaatcatgcctcttcctccttccttttttcctgatgggacttcatgatcttttgcgatgatttcgacaagttctcttcatcttccataaatctcttgatctttcgcaatgcatcctgatagcccggtatttgtaccttctcaaaaagattcactttctgagtggtctttttcctcgcatgttctagcagattcagcttggcgagcataaactcacgttcaattgccgtatgcgcaagttcctccagcagatggataccgtcggcataccatttgggagcgttaaacatactgtacggacgtatctcgaaatcgatattttcgagaagcggtacacgtacacccgcaatctttttcacgccaagatgaacgtcattcacctttatcaatgaagcgtcaaactcattccaaagggcgaacatggcttcataggcttgaatttgttgttcgagcctatcctccagatcggcagcttccgttttacagcgcttcacttccatgcggagggcgctttccttattcttgatgataggaagcgtacgcacccgcactttcagttgcttttcgagctgctgaagagaggttttgttatattgaaactttatagccacgttgtttttgctaattattggttataaatttagttgctgattattctcctttcggccagtactggtcaacaagctccttcttgatatttacttcttccggacggaagtattcgccgaacaagccccaggccacatccagcatttcagtagtatcaaggttaacatcaatagccagcaactggttagaatagtccttcgcaaaagccaacgtacgttcgtcgtaatttgtcaggtcgaaaccgttttccatcttagtcttcgcatttgcagcatcggcatacagacgtacagcggcattcatcacctgcggatggtctttacgtgtcttcttaccggttaccagctgtttcagacgagacaatgaacggaacgggtcaacaataaccttaccgatatcactgtcacgacgcaagaacaactgtccttctgtgatataacccgtattatcaggcacagcatgtgtgatatctccaccggacaacgttgtcaccgcaataatcgtaatagagccaccggaagggaattgcaccgccttttcgtaaatcttcgccaaatccgaatagagcgaccctggcatagagtctttggacggaatctgatccatacgattggatacgatagccaacgcatcggcgtagctggtcatatcggtcagcagtaccaatactttctcgttattgtttacggcgaagtattcggcagcagtcagtgccatatccggaatcagcagacgttctaccggaggattttccgtcgtattcatgaagctcacaatacggtcgagagcaccggcgttggagaatacattcttaaaatagaggtagtcatcgttcgtcatacccataccgcccagaatgatcttatctgtttcagcacgcaatgccacgtttgccatcacctgattgaaaggctggtcggggtcggcgaagaacggaatcttctgaccggataccagtgtgttattcaagtcgataccggcaatacccgttgcaatcagttccgacggctgtttacggcgcaccggattcactgacggaccaccgatttccacttcctgtccttcaatttccggacctccgtcaatcggatcaccgaaagcattgaagaaacgtcctgccaactgctcacttactttcaacgtaggcgatttgccgaggaacaccacttcggcgttggtaggaataccttccgtaccttcaaatacctgcagagtgacatcgtcaccggcaatcttaaccacctgtgccagtttaccgttcacagtggcaagctcgtcataccctactcctgtcgctttcagcgaacaagtagccttggtaatctgagtaatcttggtatatatcttttgaaaagcttttgttgccatctatatatttacaatttagctatttacaatttactatttaacgcttctttcggcaatcaattcttttaattgctgctggaatcctttgtactgctcagatttgaacttcgagtagttcatctgcttgcatacattgatcatccttttgaagtaatccattacttcattgaaattgtcaaattcaaattctgtatggcagatgtcgattatcatattcagaattgcttcctgacgttccatcggagtcaccgagtcaacctcatcaaaggcatcctgttgcaggattacgaagtcgatcaattcggatttccagaagattacgtggtattccacaggtacaccgtcatcacccagaatgttaatctgctcggcgatttccttaccacgctgcaagcgggttttcagttcattcaccttgccgatccattcgtcattgatatgctccttgatatattcttcaaattccggatattcgatatatttggaataagagtcaatcgggttcacggccggatagcgtttcttatcggcacgatcctgttccaatgcgtagaaacagcgggctaccttctttgtattttccgttacaggctctttcaagttaccaccggcaggtgacaccgtaccaatgaaagtaattgaaccggtttcgtcgttacccagtttcacataacctgcacgaccgtagaagttagaaataatagcagaaatatccatcgggaacgcatccggtccgggcaattcttccatacggttggacatttcgcgcaacgcttgcgcccaacgggaagtagagtcagccatcagcaataccttcagtcccatcgaacggtaatactcagccaaagacattgctgtatatacagatgcttcacgggcggctaccggcatgttggaagtatttgcaataataatggtacgctccatcaatttgcgtcctgtatgcgggtccaccaattccgggaattctgtaaagatttccactacctcgttggcacgttcaccacaagccgcgataattacgatatccgcttccgcctgtttggagatagcgtgctgaagcaccgtcttacctgtaccgaaggggccggggataaatcctgtaccaccttccacaatcgggttcaacgtatcgattacacgtacaccggtttccagcaatttgaaaggacgcggcttttctttgtaattcgtcatagcccgtttcaccggccatttctgaatcatcgttaccgggatgtcatttccttcttcatctgtcaggatagcaatggtatcttctatcttataatctccttcaggcataatggtctttacggtagccgttccgttcatagtaaacggagccataattttcagcggctggaagttttcgtccacctgtcccagccatgcggaagctacgactttatcaccggctttcaccatcggaacaaaatgccatatacgttctttatccaacggatatgtatattgtcctcttttcaggaaaacaccgtccatcttgtcaaggtcgttttgcagaccatcgtagttcttcgataacatacccggacccaaggtcacctcgagcatgtgtcctgtaaattcggcttcggcacccaccttcagtccacgggtgctttcgaacacctgaacatatacgtttgcacctaccaccttaatcacctccgccatcaacttatcgccaccggtagagatataacaaatctcattctgagctaccggtccgtcaacgacgagggtcaccatgttggcaataacgccactaacagttccttttgttgccatatatttttttaaatttattatctgaattctgcgggaatctgtacttcattcttcagcgattcaatgatgcttcggaacaattgatttcctctttccttatccaatgaaatccaacgctcaatcatttccagtttcagcaagaaagcgaaaatacgttcaatggtgaaatagtcgaagaaaatagcatcctccatccaattccaccgcagagcatccagtttcttctcacgttccaccagttccgtgatctcactgatcttcaccaacgattcaaaaacatccacctcaccggacaatccgaaatcgcgggcgctggatgtacgcaaggcttcgcatacttccgtgtttcctacgatatgggcagcaatatcccatttgaatttacgagcggtaaatgcaacaagaatattattaatgttcagattgaattcaaaccaggaagagacgaacttatttccgcatttcatggcgtactcataatataaagcagccagatgatcttcctgcaacaccatgctttcggcaggtgtattcagataatcggaaataaaaacagacagataagaaggaaattctttagggctgatttccccgccttctctcagaatagaaatatattcggtgagttccgcagcagagtagtttccacgtttgtctatttccgcctctttgtctttgaggagtttcagcacgttggcattatcaaacttcagatagaacaagtcgatcaacttttggtctgaagcagacaatccgctgtagatttctgttttaaaatcggctactgtatagctcagtttactgtcctccaaagtgagttccggcaaaccggctaccaagtaatagtatttactactcatagtcgctccttttaaaatagcatttctactaactgaggacgcaagaacgctttgaagtaattcatgaattcttcttctccgaaattcaccttatacgaaccgtccgccggagaaactgtgaataaagttttgataccgttcacttgttcgatcttcacacctttatccaacagagcttttgcatgggctgcaaaatactttttcagtgattctgcgtcggccgtagagatgacaataggttcatctacactccatttggatgccagcgcaacgataaacgcattcagataatccttatcctgagcgaaatccttcacagaagcggttatcaacttgtcagtaaccatcgtggcaatctcagatttaagtgcgttgacagcctgaccggaaaatagttttaactctgattttgtattatctgccagttcatcagcagatttacgagaggcagcaacaattgattccgcttctttacgagcatcctcaatgatcttctttgcttcatcctgagcattcgcgataagtctttgcgcttcttcgtttcctttttccacgccttcacgataaatcttatcggtcaactcttgaattttgttttccatattaacaggagtatttagtattattactgtattaattatgttccttcaatagattctcgccaaatttacaaaaatcaatttgataaaaaagagaaagatgcaaagaaatcgactctcttcttataaaatcacacttttacaccaattttattccgcttttctcacggttatattactaaatgacacctgtcttaaaatattataacgaataaagcatcaacgatgaattatttttgtcttgatttgatatattcttcttcttttcctgtaatcataccaagcccgatacctttaattacagtttttctccgctgatagatccccaggtatctggattcaacttcatacgtaatttgtggataaaaaacaaagtcccacagcctctctctatagatcgggtttatcgtgtcgggcatattcaaagactctttccattccttcagtcgagccggactgctttccgacgaactaccggctgtacccaataccagacaaccaaataaataagtcttttcgatcgtttccttataattattcaatctgttttccggtatagtatccagtatattattacttatctctacttcccggaatccatctaagtccggctttgaattacagccggacataccagccaacagacttataacagcaaaatactttatagttttcatttccgtttatattcaacgattcaatataatctcacccttctgtctcaaagtaagctcaagttccacatctttagctaagggattcctattcacatctggcattagtgaatacagctattttatttgcggaagaagagaaaagactggcttttatccgcccttaatttaaatcctgtttcttctaaagaagcgttgaagaaagcatgaaatcatttccgaaagtatccaaaacaataaagcccttctggtatttctaccggaagggcttctctaaaaatggcggctac

SEQ ID NO: 4627 - DNA, 26580 bp, Unknown
  gut microbiota DNA sequence
ataatactatttttcagtatccttttcagcctctttttccttcaatttcattctttttccttctgttttatttaaaatcccatattttgccaagactaaataccctttcaaaattgaactactttttcaaaatggaaaggtcggctctgttattatatatttccttcttctttatatatgtctgataatcaatttgttgctatttcttttagagttttggcacgcatttggcataatacattgcaagtattataataataaatatttaaaagattaaagacatggagataacactatcatttgttttttgcctcttgagcggctttgcctgtttctggctattttggaaatgtgtagactggtttgaaaagatctagaagaggaaaggagaattaattatgtacacagcactatttgtattaggtattgcaatcttcggttatttgatgtatgtactcatcagacccgaaaagttttaaagttatacagtttaaggtaaaagtatgaatacagaaattttaggtgtggtcgcacaagttgccttgatggtgattttggcttatccactaggaagatacattgccaaggtttataaaggagagaaaacctggtcggatttcatggctcctattgaaagggtcatttataaagtatgcggaattgaccctaaagaagaaatgaactggaaacagttcctgaaagcattattgatattgaatgcattttggttcgtatggggaatggtattgctggtttcgcaaggatggttacctttaaatccggatggcaacggtccccaaacgccggatcaggcttttaatacctgtatcagttttatggtcaactgtaacttgcagcactatagtggtgaaagcggattgacttatttcacacagctgtttgtcattatgctcttccagtttattaccgctgcaaccggtatggctgctatggctggtattatgaagagtatggctgccaagacaacaaaaacaatcggtaacttctggcattttttggtagtgagctgtacacgtatcctgttaccgctttctttgattgtaggtttcatcctgattcttcagggaaccccgatgggattcgacggaaaaatgaaggtaactaccctcgaaggacaggaacagatggtttcgcaaggacctgcggctgccattgtgcccattaaacaattaggaacgaatggaggcggttactttggtgtgaactcttctcatccgttggaaaatccgacttatcttaccaatatggtggagtgctggtctatcttgattattccgatggcaatggtacttgcattagggttttatactcgtagaaagaaactggcttatagtattttcggagtgatgctctttgctttcctggtaggcgtctgtatcaatgtcagtcaggaaatgggtggaaatccccgtatcgatgaactgggaattgcgcaggataacggtgcgatggaaggtaaggaagttcgtttgggtgccggagctacagcactttggagcattgtgactactgttacttccaatggttcggtgaatggtatgcatgattctactatgccgttgtccggtatgatggagatgctgaatatgcagattaatacttggttcggcggtgtaggcgtaggttggatgaattattatacgttcattattatcgcggtatttatcagcggtttgatggtaggtcgtaccccggaatttctcggaaagaaagtagaagcccgtgaaatgaaaatagctacgatagtagcactgcttcatccatttgtcatattagtgttcacagcaatctcaagttatatatatgtatatcatcctgactttgtggaaagcgagggcggttggctgaacaatcttggattccacggcttgagtgagcagctttatgagtatacatcttgtgccgctaacaatggttccggctttgaaggactgggagataatacttatttctggaactggacctgtggtattgtacttattcttagccgattcctgcctattatcggacaagttgccattgccggcctgctggctcagaagaagttcattcccgagagtgccggaacactgaagactgatacgctgactttcggaataatgacgtttgtcgttatcttcattgtggctgctctgtccttcttcccggtacacgctttgagtacaattgccgaacatttaagtttgtaattctgaattagagaagatatgaaaaatatgaaatcagcttctttgtttcaaaaggagcaagttatagaaagcctgaaacaatcattcgtgaagctaaacccgcgactgatgataaagaacccgatcatgtatacggtagaggtggctacagtggtcatgttgtttgtgacactttactccatcatcaatccctctcagggttcgtttgcctacaacatagctgtgtttatcattctgtttattacactgctgtttgccaattttgccgaagcgattgccgaagcacggggaaaagcgcaagccgacagcctgcgtaaaacacgggaagagacacctgccaaaaaggtggaaggtaatcaaatagtgactgtaagttcttcacagctaaagaaaggagatgtgtttgtctgtgaagccggagacgtgattccgtccgatggggaaataatcgaaggattggcctctatcgatgaaagtgcgattacaggtgagtctgctccggtgatccgggaggcgggcggcgataaaagctcagtgacgggaggtacgaaagtattgtccgatcatataaaagtaatggtgaccacccaaccgggagaaagttttctggataaaatgattgcactggtagaaggtgcgtctcgtcagaaaactccgaatgagatagcactgactattctgctggctggttttacacttgtctttgtcattgtgtgtgtgacgttaaaaccgtttgccgattacagcaatactgtcattaccattgcttcacttatttctttgtttgtgtgtctgattccgacaacaatcggaggacttctttctgccatcggtattgccggtatggaccgtgcactacgtgcgaatgtgataacaaaatcgggtaaggcagtggaaactgccggcgatattgataccttgttgctggataagaccggaactatcaccatcggtaatcgtaaagctacccattttcacactgcgccgggcattgatctgcacgcttttgtagaaaactgtctgctttcttctctgtccgatgaaactccggaaggcaaatcaatcgtagaactgggacgtgaatcaggtatccgtatgcgcagcttgaatacgacaggcgcacgaatgattaagtttacagccgaaaccaaatgctcgggtgtcgatttgccggacggaactcagattcgtaaaggggcttttgatgctatccgtaagattgtggaaactgccggaaataaattccccgaagaagtggaaaaggtgatcgctgctatttcaagcaatggtggtacgccgttggtggtatgtgttaatcggaaagtgacgggtgttatcgaattgcaggatatcatcaagccgggtattcaggaacgtttcgaacgcttgcgcaaaatgggagtgaagacagtgatggtgaccggtgataacccgctgactgccaaatatattgcagaaaaggcaggtgtcgatgattttattgccgaagcgaagccggaagataaaatggaatatatcaagaaggaacaacagtccggcaaactggtggcaatgatgggggacggtacgaatgatgctcccgctttggctcaggcgaatgtcggagtagcaatgaacagtggtacgcaggctgcaaaggaagccggcaatatggtagatctggataatgatcctaccaaactgatcgagattgtggaaatcggtaagcagttgctgatgacccgtggaacactgactactttctctatcgccaacgatgtggctaaatattttgccattgtccccgccttgtttatggtggctatccccgaactggcggcgttgaatatcatgcagttgcatagtcctgagagtgcgatcctttcggcagtcatcttcaatgcgattattattccgatcttgattccgttggctttgcgtggcgttcagtacaagccgataggtgcaagtgctttgcttcgccggaatctgctgatttacggtgtaggtggtgtgattgctccgtttatcggaattaaactgattgatttattagtaggtttattcttttaattaaaaaacaatagcgatgaaaactttatttaaatcactaaagataactcttgttttctgtgtctttttctccgtattctatattcttattttgtggttgtttgcacaagtggcaggacctaataagggaaatgctgaagttgccacactggatggaaaagtggtgggtgcggccaatgtcggtcagatgtttacaaaagatatttatttctggggacgtccttcgtgtgccggagacggttatgatgcttctagttcgtccggcagcaacaaaggacccacgaatcccgaatatctggctgaagtggaagcgcgtatcgatacgttccttgtacatcatccctatctgagccgtaaagatgttccggcggagatggtaacggcgagtgcctccggtctcgaccctaatattactccgcaatgtgcatatgtgcaggtaaagagagtggcacaggcacgtggactgactgaaaatcaagtgaaagaaatcgttgatcaaagtgtggagaagcctttactcggaattttcggaacggagaaaataaatgtgctgaagctgaatatagcacttgaagagaataaataaccaaacactgggcggcgtgcctgtccgaatcgttttagttatttattgcggttcaaataaacagggctggacagggcgctgctcttttttagaaacataaaataaaaagataaatatgaagagtttttttagtaagaagattgttgtaggagcattggttacggcaactgtatgcgtatcgggtataacggatgcaaaagcacaggaatttactgtgcagggagatattgtcagttcctatgtctggcggggaatgtatcagggtggaggtgcggcttttcaacccacgctggggtttgggctcgataatttttctgttaccgcatggggatctactaatttcagtggagggaataaagaactggatctgactcttgcctataagtttggtgaggcaggacctacgctgacggttgccgatttgtggtgggaaggtgaaggagcatataaatattttaattttaagagccacgagacgggacatcattttgaggcgggattggcttatacgttgcccgtagagaagtttcccctgtccgtagcgtggtatacgatgtttgccggaaaagacaagaagctgaatgatagcggagaactgaagcagaattattcctcctatctggaactgaactatcctttcagtgtgaaaaatgtcgatttaaatgtaacttgcggcgcagtgccgtataaggcggagggtatgtacacgaatagtggcttcgccgtgactaatgtagctttaaaaggaatgacagagataaaaattaatgataagttttcattgccgatatttgcacaggctatatggaatccatgtgttgaagatgcttttttggtttttggcgtaactttaagaccatagatataaactcatgaatttttattatgcagaaacccgtggtgatcgtgatgattactacgggttgaaatagtttataaacagcaattaatgaaatggatatggatagagaacagagtgtacaacattttttggatctgatcaagaagtctcatcgaggcaagtttaaaatctatatcggcatgatagccggtgtagggaagtcttaccgtatgcttcaggaggctcatgaactgctggagaatggggtggacgtacaaatcggctatattgaaactcacggacgtgccggaacggaggctctgatgcagggactgcctgtgatcccccgacgtaaaattttctataaaggaaaagagttggaggaaatggatgtggacgccattatccgccttcatcccgagattgtgattgtggacgaactggcacacaccaatgtggaaggcagtttgaacgagaaacgttggcaggatgtgatgactctgttggatgaggggattaatgtgatttccgcaatcaatatccagcatatcgagagtgtgaatgaagaagtgcaggagattacagggatcgaggtgaaagaacgggtgccggacagtgtgcttcaggaagcggatgaagtggtgaatatcgacttgacagcggaagaactgatctcgcgtctgaaagcaggaaagatataccgtccggaaaagattcagacagcgctggataatttcttccggaccgagaatatccttcaactgcgggaactggctctgaaggaagtggcgctccgggtggagaagaaggtggagaatgaggttgtgatgggtgtctcggtcggaatcaggcatgagaagttcatggcttgtatcagtagtcatgagaaaacacccaggaggattatccggaaggcggcacgtctggcaacacgatataatacgactttcgttgctctctatgtgcagactccgagggagagtatggaccggattgatctggccagtcagcgttatttgctgaatcattttaagctggtagcagaactgggcggagaggtcatccaggtgcagtcgaaggatattctggggagtattgtcaaagtttgtcgggacaagcaaatatcttctgtttgcatgggaactcctaatctgagatttcctcatgccatttgctccatactcggatatcgaaagtttttgaataatttgtcacaagctaatgtagatttgattatacttgcataatattaaccgtatgaacgatatgaatattaaaacaaaactgattctcggcatcgggatgctggcgggaatgattattttgctggtaacactttctgttgtgaaccttcagttgctgactgccacagaacctgacagtcctgccgctatgccggcattggaacgcgctctgttgtggatttccgttaccggcggtatttgtatattgaccggattgacattgctgtattggttgccccgaacaatcagtaaacccatcaaggaactgaaacaagggattcttgaaatagccaatcataattatgaagaacggctggatatgagaaataatcaggagtttcgggaagtcgccgagagtttcaaccgtatggcggaacgtctggccgagtatcgggcaagtacgttagcggatattctttctgccaagaaattcattgaggccatcgtgaacagtatcgacgatccgataatcggtctgaatatggatcgtgagattttgtttattaatgaggaagcactgaacgtgctgaatctgaaaagaggtaatgtcatacgtaaatctgcggaagaattgtctttgaagaatgatctgcttcgccggctgattcgtgaattggtgacgccgggagatcagaaagagccgttaaagatatatgccgatgataaagagagttatttcaaggcttcctatattcctatcataaatacggatgcagggaaggatgaacccagcaaattaggggatgtcattctgctgaagaatataacggaattcaaggaactggattctgccaagactacatttatttcgaccatttcacacgaattgaaaactccgattgcggctatcatgatgagtctgcagctattggaagataaacgtgtcggtgagctgaatgatgaacaggaacagttgtccaaaagcatcaaggaaaatagcgaacgcctgttgagcattacgggcgaattgctgaatatgactcaggtagaggcaggcaagctgcaattaatgccgaagataacgaagcccattgaactgatagaatatgcgattaaagctaatcaggtacaagcggataagttcaatattcagatagaagtagagtacccggaagagaaaatcggcaagctctttgtcgatagtgaaaagatagcttgggtattgactaatttgctcagcaatgcgattcgttattctaaagaaaacgggcgtgtcgtgattggtgccaggcaggaaggagatatgatcgacctgtacgttcaggatttcggtaaaggcatcgatccccgttaccacaagagtattttcgaccgttacttccgtgttcccggaacaaaagttcagggcagcggactcggtttgtctatttcgagagactttgtggaagcgcatggcggtacgctgacagtagaaagtgaactgggaaaaggaagtcggtttgtgatgcgactgaaagcataaaagagaatgttcggaaagtgtccgaggcggttgctgtgataaataaatgtggtagctgatttaatttgaaatgaaactttgggaatcaagacattgcagcgtcttttaaaatctttatatttgcagactaattgaagttaaagtcaaatttatacaatataataacttaaaagaaccagaatcagatgaaacaggacatgattgttatccttgacttgggtagtcacgagaatacggtattggcgcgcgccatccgtgcattaggagtttatagtgagatttatcctcacgacatcacagtagaagaactgaaagcattgcccaacgtaaagggtattattatcaatggtggactgaacaacgtgatcgacggtgttgctattgacgtgaatccgtctatttatacgatggggattcctgttatggctgccggtcacgataaagcgacttgcgcagtgaagcttccggcatttacagatgatatcgaggctattaaggctgctataaagtctttcgtatttgatacttgtcaggctgaagctaactggaatatggcgaactttgtcaatgaccagatcgagctgatcagacgtcaggtgggtgataagaaagtattgctggcattgtcgggtggtgttgacagctcagtggtagctgctttacttttgaaggcaatcggtgaaaatttggtatgcgtgcacgtaaatcacggcttgatgcgtaaaggtgagtctgaagatgttgttgaagtattcagcaaccaattgaaagcaaatctggtttatgtagatgtaacagaccgcttcctggataaattggcaggtgtggaagatcccgaacagaaacgtaagattatcggtggtgagtttatccgtgtgttcgaagaagaagcacgtaaactggatggtatcgatttcttaggtcagggtactatttatccggatattgtagagagcggaacgaagactgccaagatggtgaaatctcatcataatgtaggcggtctgcctgaagatcttaagttccagcttgtagagcccttgcgccagttgttcaaggatgaagtgcgtgcttgtggtctggagttggggttgccttatgagatggtttaccgtcagccgttccccggtcctggtttaggtgtacgttgtctgggtgctatcacacgcgatcgtctggaagcagtacgtgagtctgacgccattttgcgtgaagagttccagattgccggcctggataaaaaggtatggcaatactttaccgtagtgcctgactttaaatctgttggtgtacgcgataatgcccgttctttcgattggccggtgattatccgcgctgtcaatacggtagatgctatgacagctactattgaaccggtagactggcctatcctgatgaaaatcacagaccgtattctgaaagaagtgaagaatgtgaatcgtgtttgctatgatatgtcgccgaaacctaatgcgactattgaatgggaataagagtatagagcattaaatagaatagcccccggaagctgaatataaactttcgggggctaattttttgcatttagcgtcacctatggcgtcacctgccaccaattgatgtataaaagaaaaaggcacccaagagtggaagcctctcaaatgccttattcttatcaagtagcgggacccgggattgaaccggggacctcatgattatgaatcatgcgctctaaccagctgagctatcccgccatcatttctcgattgcgggtgcaaagatagatatttttctgtaatctccaaaacaattcataacttttttgtgttttttctttagaacgaggttctctttttcctataaatagggagtttggggccttgaaaagaaataagttttaaataaagtgtctgatttatgccacataattagaaaaaagtatttatcttggcacacgtaaaaacaattcgaaattgctatgaaaaaagaaaaaattcatttggagtatttgttgaacgcaacatctaaaaatattctttgggcagctattagcacaccgaccgggctggaggactggtttgctgataaagtagtatctgatgataaaatcgtagaattccattgggggaagactgaacaaagaaatgccgagattattgcgatccgttctttctcatttattcgctttcgttggcaggatgacgaaaatgaacgcgattactttgaaatcaaaatgacttataatgagctgacaagtgactatgtattagaaattacagacttcgcagaggcggacgaagttgctgacatgaaagaattgtgggagtcgcaagtggcgaaattgagaagaacgtgtggtttttagttaactttcaactaaaaattttctatgctactttttttgtgctaattttgcgtcttaattgcacgaacctattaagatgctacgcataaagaaattagatatatttatcgtaaagagcttcctgatgctctttataggtacattcttcatctgtctcttcatcttcatgatgcagtttttgtggagatatgtagacgaattagtcggaaaggggctggatatgagtgtgatagctcagttcttcttttattccgcattgacactggtgccaatatcgttgccgttggcaatattgctggcttctttaataaccttcggtaactttggcgaacgttacgagttgctcgcaatgaaagctgcgggtatatccttgcttaaaattatgcgcccgctggctttctttgtctgtggtttggttgctgtctctttttatttccagaatgtcgtggggcctattgctcagacgaaactatacacactgattatttcgatgaaacaaaagtctccggaattggatatcccggagggggtgttttattcagaaataccggattataacctgaagatagccaagaagaaccggaagacaggtatgatgtatgatgtgctgatttataatctgaaagatggatttgagaacgcacatattatttatgcagattccggacggatggaaatgactgcagacaagcagcatctctggctgcatttgtacagtggtgatttatttgaaaacctgagatcacagagtatgaaatctcagaatgtaccgtatcgtcgggaagaattccgggaaaaacatacgattattgagtttgactcagactttaatatggcggatgccagtattatgagcaatacatctgctgccaaagatatgtcgatgctgcaagcctccatcgactcaatgaaaatggtgggcgatagtatcggaagacaatattaccgggaagtttctgaagggaatttccgtagcacctatggattgacaaaggaggatacggtcaagattatggaggcgaatattactgaatataatattgacagtctctatgaggtagctcctttgatgcagaagcagaaggtgatttcatccgctgcaagtcgtgcggaaaacctgagcagtgatataaacttcaagagttacacgatgggtagccatgattatagtatgcggaagcatgagatagagtggcataaaaagatcactatttcactttcctgcctgctgttcttcttcattggtgccccattgggcggaattatccgtaaaggaggactcggtatgccggtcatcgtttcggtgatggtattcatcatttattatatcatagataatacaggctataagatggcacgtgacggcagatgggtcgtatggatgggagtgtggaccagtagtgccgtgcttgccccgttaggtgctttcctgacttacaaatcaaataaagactctgtagtgctcaatgccgatgcgtatatcaattggtttaagaagattgtcggtatccgtaacatacgccatttattcaagaaagaggtggtgattcacgatccggattatactcgcataccgggtgatttgcaggtgcttactgacgagtgcaaagagtatatagctaaaaatcgcctgatgaaagccccgaattattttaagctgtggatgtcgggcgagaaggatgatgagatgatatctatcaatgaaaagttagagacactcatagaggagatgtccaatacgaagtctgtgactttgctgaacacattaaacaattatccgattatttccgtttctgctcatatacgcccgttccacacctattggctgaatctggctgccggggttattttccctataggattattcttttatttccgtatctgggcattccgtgtccggttggcgaaagatatggaacggataataaaaaacaatgaacaaattcaattcatcatacagaatattaataaataagtgttatggaagagattaaaatggatagaatagaagatgcgattgccgatttcaaagaaggcaagtttgtcattgtagtggatgatgaagatcgtgaaaacgaaggtgatttaatcatagctgccgaaaagataactcctgagaaagttaactttatgttgaaacatgcgcgtggtgtgctctgtgcgcctatcacggtgtcgcgttgtaaagaactggatttgccgcatcaggtcagtgataatacttctgtattgggcactccttttacagtgacaattgacaaactggaaggttgtagtaccggagtttctgcttccgaccgtgctgctactattcaggcgttggccgatcctgcttctacaccggctactttcggacgtcccggacatattaatccgctgtatgcacaggaaaaaggagtacttcgtcgtgccggacatacagaagctaccatcgatatggcacgccttgccggactttaccctgcaggtgctctgatggaaataatgagcgatgacggtacgatggcacgtctgccggaacttcgtgcaatggctgatgaacatggactgaaactgatttccattcatgacttgattgcttatcgtctgaaacaggagtcaatcgtagaaaaaggcgttgaggtaaatatgccgaccgaacatggtatgttccgtctgattcctttccgtcagaaatcgaatggactggagcatatggctatatttaaaggtacatggaatgaagacgaacctatcttggtgcgtgtccattcatcttgcgctactggtgatattcttggctcacaccgttgtgactgtggcgagcagttgcataaagcgatggaaatgattgaaaaagaaggaaaaggtgtggtggtttatctgaatcaggaaggccgtggtatcggtttgatggaaaagatgaaagcatataaacttcaggaagacggtatggataccgttgacgccaacctttgcttaggacacctggcagatgaacgcgactatggagtaggagcccagattctgcgtgaactgggagtgcacaaaatgaaacttctgacaaataatcccgtgaaacgtgtagggctggaagcctatgggctggaaattgtagaaaatgtacctgttgaaacagttcctaatccatataatgagcgatatctgagaacaaagaaagaaagaatgggacatacattacattttaataagtaaaatgccattttgttttcatatatcgaatattatcgcttattttgcaacgaatttcactcaacaacaataaaatagatacaaaatgaatcaattatcagatcgtttgaacagcttgtcgccgtcggcgacgcttgccatgtcgcaaaagagcaacgaactcaaagcgcagggtattgatgttattaacttaagtgtaggagaaccggatttcaatactcctgaccacatcaaagaagctgcgaagaaagccattgatgataacttttctcgctactctccggtaccgggttatccggctttacgcaatgcgattgttgagaagctgaaaaaagagaacggtcttgaatatactgctgctcagatttcttgtgccaatggtgcaaagcaatctgtatgtaatgcgatcctggtattggtaaatccgggtgatgaagtaattgtaccggctccttactgggtgagctatccggaaatggtgaagatggcagaaggtactcctgtcattgtttctgccggcatcgaacaagatttcaaaattactccggaacaactggaagcagctattactccgaaaacaaaagcattgattctttgttctccgtccaaccccacaggttctgtttacagtaaagaagaactggctggactggcagccgtgctggctaagtatccgcaagtagtggtaattgctgacgagatttacgaacatatcaattatatcggtgcacatcagagcattgctcagttcccggaaatgaaagaacgtacagtgatcgtgaacggtgtatccaaagcctatgcaatgaccgggtggagaatcggtttcattgctggtccggaatggattgtgaaagcttgtaacaagcttcagggacaatacacttcgggtccttgctcggtatctcagaaagctgccgaggctgcttacgtaggtacacaagaaccggtgaaagaaatgcagaaggcatttgaacgtcgtcgtgacctgatcgtgaagttggctaaagaagtgccgggtttcgaagtaaacgtaccgcaaggtgctttctatctgttcccgaaatgtagctacttcttcggcaagagcaacggcgaacgtaaaattgaaaactcggacgacttggcaatgtacctgctcgaagatgctcatgtagcttgtgtaggcggtacttcctttggtgctcctgaatgtattcgtatgagctacgctacaagtgatgaaaacattgtagaagctatccgtcgaatcaaggaagcattggctaaattgaaataagcaatcttagagaatatagaacggtaggctatctcctgaaaaagaaagtctaccgtttttttatgtaatttccttttgtccgtagcgataaaataaaaaaggctgccttccgtagaaagcagcctatacttttttgtagattgtattattcagccgggtgaatagcttcagacgggcaaacgtctgcgcaagttccacagtcagtacatacatctgggttgatagaatagatatcaccttcagagatagcttctaccggacactcgtcgatacaagttccgcaagcaatacaatcgtcactaattacgtaagccatttttttaagatttaaattattagtactaattcgttcggcaaaaataaagcttttattcattacttggtatgcttctttgattaaattgacttaatttgtacgtcttctaaataagcaacctccctattatgtgctatatttttcgtatttttgcagccaaattactaatatatagcgattatgcctttaaatttacctgataagcttcctgcaatagaattattgaaggaagagaatattttcgtaattgatacttcgcgtgctacgcaacaggatattcgtccgttgcggattgtaattctgaacctgatgccgttgaagattacaacggaaacagacttggtgcggctgctctcgaatacgcctctccaggtagaaatctcgtttatgaagatcaagagtcatacatccaagaatacgccgatagaacatatgcaaacgttctataccgacttcgagcaaatgcgtaacgagaaatacgacggcatgatcatcaccggtgctcctgtggaacagatggacttcgaggaggtgacttattgggaggaaattaccgaaatatttgattgggcacgtacgcacgtgacgtctaccttatatatatgttgggctgcgcaagccggactgtatcatcactacggagttcccaagtatccactggaccagaaaatgttcggtatcttcgaacatcgggtgctggaacctttccattctatcttccgcggctttgacgattgcttctatgtgccgcatagccgccatacggaagtacgcagggaagatatcctcaaagtgccggaactgacattgctttccgaatcgaaagatgcgggcgtttatatggctatggcacgtggcggacgtgagttcttcgtgaccggacactcggaatactctccctataccttggatacggaatatcgtcgtgatctgggtaaaggactgccgatcgaaattccccgtaactattacgtagatgatgatccggacaaaggtccgttggtccgttggcgcgctcatgccaaccttttgttctccaactggctgaactactttgtttatcaggaaacgccttacaacattaatgatattgaatgatcaagcagcgtaaaatagaacttctcgccccggcgaagaatctggaatgtggtatcgaagctatcaatcacggagcagatgccgtatatatcggtgcacctaaatttggcgcccgtgcagcggctgtgaattctctggaagatatcgaagcgttggtaaaacatgctcacttgtataatgcccgtatctatgtcacagtcaatacgattctgaaagaagaagagttgaaagagacggaggagatgatccatgccctgtatcgggttggcgtggatgccctgattgtgcaggatatgggaatcacgaaactgaatcttccgccgatacctcttcatgccagtacgcagatggacaatcggacaccggaaaaggtgaagttcctttgggaagcgggtttccgtcaggttgttctggcacgggaactgtcgattcgtgaaataaggaagatacacgaaatttgtcccgaagttccgctggaagtatttgtacacggggcgctttgcgtaagctatagcggtcagtgctacgttagtcaggcttgtttcgggcgcagtgcgaatcggggagagtgtgcgcagttttgccgcttgcctttcagtcttgtcgattcggaaggaaaagtgattgtgaaagacaagcacttgctctctttgaaagatatgaatcagagtgatgaactggaacggttgctggatgccggagcttcctcattcaaaatagaaggacgtctgaaagatgtgtcttatgtgaagaatgtaacggctgcctatcgtcagaaactagatgctatctttgcccgccgaccggaatatgtgcgcgcttcttccggcacttgccgtttcgactttaaaccgcagctggacaagagtttcagtcgtggatttactcattacttcctgcatggacgcagtgaggatattttttcttttgatactccgaaatcattgggagaggagatgggtacaatgaaagaagcccgtggcaactttctgaccgttgccggactgaaatcatttaataacggagacggtgtctgctatattgatgaacagggacgtttgcagggattccggattaatcgggtggatggaaacaaactttatcctcaggaaatgccccgcatcaagccccgtaccaagctctatcgcaacttcgatcaggagtttgaacgcatactttcccgcaagtcggccgaacggaagattgccgttaacatactgcttgcagacaacaacttcggtttctctctgacactgacggatgaggacgataacagcgttacgctcactctgcctcgtgagaaagagccggctcggactccacaggctgataacttgaagacgcagcttgctaaattgggaaacacgcctttcgaagcggaaaagatcgaaatctccttctcggagaattggttcttaccggcttctgttttggcggacttccgtcgccaggcgatagaaaagctgattgctgtccgacgtatcaactatcgtcaggaactggctgtctggaagccgacttcacatgattatccgcaggctgcacttacttatttgggaaacgtaatgaacacccgtgcagcttctttttatcgggaacatggagtgcagcaagtggctgaggcttatgaaaaggaacgggtggaagatgccgtgctgatgttctgcaaacactgcctgcgttatagcatgggctggtgtcctatccatcagcgagtgcgctcgccttataaagagccctattatctggtatcgaatgacggaaaacgtttccgccttgaattcgattgcaaaaactgtcaaatgaaagtaaaagcggcacaatgaaacgattccccggcagagatatgcggagtttaacggagcttgttctcggcagagataagtttcgtacagctttgtgctgttctgtcgtggggatgttgctgactctgctgttcctttcatcctgtcactatacgcgtcccgatcttacttccgaggaactgtcggagaagacaagagattctctgaactatctttatgaccggcattatacctggaatacgaatctggaagtaaccaccgactcggtaacaatggagtgcctgcccatcaaggacacctacattgcattgtataaaggagatcgggtggttgttgccgagtttgccattcaccctgccgatagtgtggacagtgtctgggtaaagctggcgcatacacaagaggagcaggggtggatacgtgaaacagaattgaaagaatcgtttgtgccgacggacagtatttcgcaggctatccattttttcagtgatacgcatgcttcttatttcatgattatcttcgcgttgtttgttggagtctatctgtttcgcgctttccgccggaagcagttgcagctggtctattttaatgatattgacagtgtctatccgttgtttctttgcctgttgatggctttcagtgcgacggtttacgaatcaatgcaggtctttgtgccggatacgtgggaacatttctatttcaatcccaccttatcgccttttaaagtgccttttatactttcagtctttttgttgagcatctggttgtttctgattgtcgctttggcggtgcttgatgacctgttccggcagttgactcccgccgctgcggtcttttatctgctgggactgatgtccagttgtattttctgctatttcttctttatcctgatgacacatatttatatcggttatttgttccttgcattctttatctgggtttttgcgaagaaggtgcatcggaatatcagctataagtatcgttgcggacattgtggggagaagttgaaggagaaaggtatttgcccccattgcggagcgattaatgaataatcttttatatcttgtttttatattcaaatcatacttctgaatgatggaaatcagacttaccgaattgaaagatctccctttggtgatggagatttatgattatgcccgtgcttttatgcgtgccaatgggaatgcaacccaatggattgacggctatccgtccgaatcatttatccgtcaggagatagaagacggtcatagctttgtctgtacggacgaacaaggggaaatattgggaactttctgctttatattaggcgaagatcctacttatctgaatatttatgaaggtgcatggcttaatgacgaaccttacggtgtcatccaccggatggctaccagcggtaaaaggaaaggcgtatcggaagcctgtctgaactggtgctttgaacattttgagaatatccgtgtggatacacatcgggataacaaagttatgcagcatattctggcgaaatacggctttcagcgctgtggcatcatctatgtcaagaacgggacagagcgcattgcttatcaaagaatactttaattgtgcgctacctttctcatgcagtctgttcatagataagttgttagtccatatagatcaagcatcagtattatatggggcaagcgttggtttcctcggaggaaacgccagttccctttaaaaggaacggccgttccctcgccgggaaacgacagtttccattgcgggaaatgacaggaaactataagttgttgagatttagctatatagagttctgttggcaatgttatagagtttatgttcatgcccgtacggttttgagctaaatgatagtcagctgaccattcagcagatcagcgaacagctgaacttctcgaatcaatcattcttcgggaagttctttaagcgctgtgctggtatgtctccaaaggactatatgaacagttgatctgttatttcttagaatcggcagcggaggtctattccgaattgtacgggacgtcctttctgcataaatcctttgttcattgtttcaaagtagaaggctgcatagtctttgtccaggaagttacgtgcccagaagctgatcattgcattccctttttcaagatttgcacgccagttcagtgtgccgtaaaaagattggctaacatcattcagttccgtccagtagatgcgtccggcagcattgtagtttgcttggaatacaacacggtcgaagatggaacgggagctacaggtgatggcgtattctcctccgatattaagcgtatgcttggggacgaagggaacatatttgccgttgtagtcagcttttactgttaggttgccatctttgtctgcttcatttataatatagtcggtaaaggtggcgtacgtatatccgtaacttgcgttcagacttagttcgttggtcaggctggcgcggagggatgcttctgcaccgtagctgttgcttttgcctgcattgattgtggtacgtccaagaccgctgccgataaattgagagagttgctggtcacgggtatccatatagaaagctgcaaggtcggcccagagttttccttcccacaaagtgagatgagtacccacctcataattccatgaatattccggtttataggtggttgcatcttttacttcgggtatagcaggcattttgtctcctatcattccttcaatcaatgtgctgtatttttcgaactccgcgctttttttaatggcttctaccatcgagtgcgcctgttgtccggtgattatatcagaaaacatttggacgttatagcctcccgaacggtaacccttggatactgtagtgtaaacgttattgccttttctccattcgtattgtaaggcaaacttgggtaataattggacataatcttcagatagtttaccattgtaggcagcatctgctatcaggtctttggcggtaataaccatagggcccatggcaaagttgaagtcgaagttgagtgggtcgcttgccgaattgtacttcatactcatcttttcgtagtccagacgaagacctacagtgaaggatagtcctttggtaaagaggttattgaaggttgattgatgaaaaatggctccgttccatattggagtatcaaagttgccactgactcttaacgtagggttaagaacactcatgctcatcttaggtgctttattccctaaattttcaaagatgctgttggtatttccttcaatagtttcttttaccccgtcttctttgaaggtaaccggaccgtctgtattcaatgtctgatagaatccaaagatacctgttgtccattcccacttacggttgggcttcgatttaagcacaatttcttctgaaatagtatttagtttctgcttctgggtaagattgaatatgttcttttcagtaaagtcctggtcgagaaacattcggtctttcagatgctgataaccggtaacagcgcttaggatgaaattcttggcttgatattcgacattaaatcctgcattcagcaggttacggtagtagttgcttctatcattatatgcaatctttccgatcatttcttcccgttcttcagtctttcccttgttgacgccttcctgggtgatgcctgtgtaaaagtaaggatatcctccttggtcactatattcgtagctgacattcaagtctagtttaaggttatctttcggcagataaatacctctgaaccgtccacctcctgcattgcctttgtctacccgttcattattgcgtgcagagttttgatagaatcctccggtatgttcgtagaatcctccggtagaaaaggcgaattggtcggatatacggtggtaatgtgttaacgatacattgtagtcattataagttgctgctcccatacggatatctgtaccttgatatgtgaaaggtgacttggtgtgtaccttgatcagcccgcccattgtattacgtccatacaaagttccttgcggaccgcggagtacatcaatacgttctatgtcggagtagttgaaatcgaaagctgatttatcaatataggggatgttgtctacatagagtccgatagccggtgtgttgatacgtgaaccaatcccccgaatatagatagaagtagtcagctttgatccatactccggaatgaaaatattcggaatgagtccggataatcttttcacggagttcacttggttagcctgcatgtctttctgtgacaatacagttgtagctgctggcagctcacgtagtttccggttttctttcggagtggcgatcactaccacttcttcgatgtctactactttaagagaatctttagggaaatcttcagcccatgttgttcctgtcgtcaggagtgtgagggcaatcataatattctttgttttcattcgcagttaatttgtctggtgcaaagtaacggcaaatatataaggtaggcaatcctcatttattaggattatgcctcatattttaagaaatcagattcggtccgcctctatgtatccgttcattactgcatagatggttaatcctgatacagacttgattccaagtttttccgtgatatttttcctgtgggtgatgacggtggtcagactgatattcagtttgtcggcaatttctttgttgattaatcctttggtaatcagaaccagtacttctatctcacgggcagataagatttcctgatgtacctccggcatggcaatcgggggcatatcttttacaggatagccgttgtggtgtgcatgttgatgaagcttcaaaagacttttcaccagtttctcttcgggttcgtagatattgagtacaggcacacccgacagttggaattgcgggctgtcactggccagcacaattgttttccgctttcgggggaggaagaaggcattgtgttcaacatagatttgcgccgagatgaagtaatgggcatacatgtccggggtatcatccattagttcactgaaactatggaaagtacggatagttgccattggaataatttcttccaatatacttttcagtccgagacaagtgagggtattggactcgataatggctatttcaggtttgtagttcatttgaccgtagaatatttattaatgattgatataattagctaccgcttccgcacaccgttctccatcgactcctgctgaaacaattccacctgcataccctgcaccttctccgcagggaaatagtccgcgaacagtgacgtgctgtaacgtctccttatcccgtacgatgcggactggcgaagaagtgcgggtttccacaccaatcatcaccgcttcattcgtaaggaaaccatgactgctacgcccgaactgctgaaaaccgagagataaccttttgctgataaagtctggcatccaaaaatgaagcggagaagaaatcagccccggactgtaggaagattccggtaaatcaaaacttaatttcttgcgagtaaagtccagcatacgttgcgccggtgccgtttggcgcctgccaccctgcaaccagcattgacgttccaactcctcctgaaagtgaaggggcgtaagttgagtattgagagtcaagagctgagaattgctcagcaatggattaatggctaataactgcgcattttgttgcgcagccaactctccactctccattttcaactctccacttataaaatcttccggttgaatctctaccaccattcctgagttactccaacgcgatccgcggttagaaggagacattccgtttactacaacttgttccggtccgctggcggcaggaacaatgaaaccgccgggacacatacagaagctataaactcctctgccttcagcttgtgtcacgaagctgtattcggcagcaggaaggtatttcccccgcccgttcttattgtggtattgtatctggtcgatcagcatagccggatgttccagccggacaccgacagcgattcctttggcttctatcgtaacaccgtttgcagccagccagcgatatacatcccttgcggaatgtccggttgccagtatcacaggaccgagaaaagtctttcctgtgttggtttcaatacctttgctttcgttgttctcaataatcagtgcatccattctggtctgaaaatgcacctctccaccacactcgataatcgtattccgcatattctcaatgacacgcgggagtttgtctgtcccaatgtgaggatgggcatcggccagtatagccgcagaagctccgtgctgacagaatacattcagtatcttgtctatatttcctcttttcttgctacgggtgtaaagttttccatccgaataggctcctgcgcctccttcgccaaagctatagttcgattccggatctacggtatgttctctgctgatttgtgccagatcttttttccgttcgcgcacatcttttcctctttctacgataaccggacgtagtccgagttcgatgaggcgtaaggcggcaaacagtccgccgggaccggcacctactatgataacctgtggcttgccttccacattattatatatagtgcgttcgaattcatcctccttgggcatctcattaatgtatgcccgtactttcaggttgacaaagatagtccgttgacgtgcatcgatgctccgtttcagtattcgggtagcagtgatattacgcaggttaatgcctttttctttagatatatattctttcagtcgctgttcgtttgctgcgatttcgggaaggatgcggagttggtattcttgtgtcatggatttattttaatttaaacttatccgaagagtgctctgaatgcctcttccaccttttttacaggtactaattctatttttagtttttgggtatcaatcccttgcagattatatttaggaagcaggaaccgtttgaatcctaacttttccgcttctccgattcgctgctctattcgatttacggggcgtatctctcccgacagaccgatttctcctgccatacagacttccggttcgacagccgcatccatattggaagaaaggatggcactgatcactgccaggtcaatagccggatcattcaccttcaatcctccggcaatattcagaaacacatctttctgcgcaagcttgaagcctacgcgcttttcgaggacagccagaagcatattcattctccgtatatcgaagccggttgccgaccgttgaggatttccatagacggcagaactcaccaaagcctgcgtctcaatcaggaacgggcgtactccctcgatagcagaagcaatcgctactccgctcatcccttcatgatcctgacttaacagcaactccgaaggattgctgacctgacgtaatccgtcctgacgcatttcgtaaatacctagctcggcagtgcttccgaatcgattcttgatgcttcgcagaatacggtacatataatgctggtctccttcaaactggagaactgtatctacaatatgttccagtacctttgggcctgcaatactgccttctttatttatatgtccgatcagcaggacgggtgtatgcgtttctttggcaaaacggagaatcgatgccgaacattcccttacctgggcaatgcttccgggagatgattcaatattttccgtggaaatagtctgtatggagtcgataatgaccaggtcgggactggtgttcttgatatgcacgtaaatctgttcaagtgaagtttcacaaacgatcagacagtcgctggagacttccgaaaggcggtcggcgcgtagtttcagctgtcgtgcgctttcttcgccggatacatagagaatcttcttgtccggcatacgcaagacagtctgcatgacgagtgtcgattttccgattcctggttcgccgccgatcaaaaccagagagccgggcacaagtcctccgcccaatacacgattcagttcgtcgtcgtgcatattgatgcgcggctcatcatcggcttctatttcgctgaggataacaggtttcgctttctgcgtctcgatgcccgataccggacggcggttagtcgtttctttccgtacgatctcttctacatacgtattccattctccgcacgacggacacttgcccacccatttcggtgattcctgtccgcagttactgcatacatatacggttttttcttttgccatt

SEQ ID NO: 4628 - DNA, 21804 bp, Unknown
  gut microbiota DNA sequence
taagaacatcaatttagtcacggccgattctgtcgtactgtcatatccggagaccactcctgcctgtagtagctggtaccctgtttcgtaacgttccatctccaccattccggcattgcactgggttacattgacaatgacaatcccctgcgcactggcctgacaaagcctgcggataaaccattcctttcggggagcattgccggaaccatacgtttcgagtacgaccgcttttaatcctttggtctctaacatcgtagctactacattctcctgaatgccggggaataacttgagaaccacgatgttcgtatccaataaataatgtggcactaactcctgcttgcttttgttgacatgaatctgtgcctgattatatttaatgtgaatacctgcttccgccaataccgggtaattgaatgagcggaatgcgttgaagttttccgcgttcatctttgtcgtacggtttcccctcatcagatgattctcaaagaagatgcagacttccggaacgagtgctttcccctccttatcctgtgcggcggcaatttcgatacttgtcatcaggttttcctttccgtccgtgcggagcacccctatcgggagttgggagcccgtaaggatcacaggtttgtccagtccttccagcataaaactcagggcggaggctgtataagccatcgtatccgttccgtgcaaaatgacgaagccatgatagagatcatagttctcatgaataatgtgtaccagctttctccacatatcgggttccatgtccgaagagtccatcggagggtcaaactgataagtatcaatcgggaagttgaatttttgcaattcggggatatgcctttggagttgctcgaagttgaagttctccaatgcgcctgttgcggtgttttcaatcattccaattgtcccaccggtgtatattaacaatacggaagtatttaacggggtcatatgctggttttatgctgttgtttttgcaaatataataatataaacgatatataaatagcaaaatgtcataaaagtgcagggcttttatgggagggaaaagagacgggatgttctttttatcagaaaaaaaccgaaaaaagtgatagattgaacgtttttattattacttttgcgacacttatcaaaaacaatggtagaaacagagactatgatgaagtactatccacatacagtcacatccatgtgtaccatgaccctttggggttaatggatagtatttgtgtatctacgtgattcacgcctgtgtaagtaggcaaaactcaattttaattttttcgtaaacaaccaatcaccctgtaataactatactcgaggggattgtatttaaatatgtatcttcatgaaagtaatgaaattcggcggaacgtccgtaggttccgtgaacagcattttaagtgtaaagagaattgtagagtcggccagtgagccggtaattgtagttgtttccgcgttagggggcatcactgacaaattgattaatacatcgaagatggcggcagccggagattcggcctacgaaggagaattccgtgaaatcgtctatcgtcatgtggagatgattaaagaagtgatacctgccggagcagggcaagtggcattgcaacgtcagattggcgaattgctgaatgagttgaaagacattttccagggtatctatctgatcagagacctttccccgaaaacatcggataccattgtcagctatggcgaacgtctttcgtccatcatcgttgccgaactgatcgatgaggcaaaatggtttgattcacgtacttttatcaagactgaaaagaagcataataaacatacgattgatgccgatctgactaatcagttagtaaaagaggctttccattccattccgaaagtgtcgttggttcccggatttatttcttcggataaggtgtcgggagacgtgacgaatctcggtcgtggtggttcggattatacggctgccattattgccgcagcgctcgatgccggcagtctggagatatggaccgatgtagacggctttatgactgccgatccgcgtgtgatctcaacagcttatactatttccgaactgagctatgtagaagcaaccgaactttgtaacttcggtgcgaaagttgtttatccgccgacgatctatccggtatgtcataagaatattcctattataataaagaatacgttcaatcctgacggagtgggaacagttatcaagcaagagacttccaatccgcagagtaaggccattaaaggtatttcctctatcaatgatacgagtctgatcactgttcaggggctgggtatggtaggtgtgatcggtgtaaactaccgtatcttcaaggctttggcaaagaatggaatcagtgtattccttgtttcgcaggcttcatcagagaacagtacctctatcggtgttcggaatgctgatgccgatctggcttgtgaagtgctgaatgaagaatttgcgaaagagatcgagatgggagagatttctccgatccttgcagagagaaatctggctacggtggcaatcgttggcgagaatatgaagcatacaccgggtatagcaggtaagctcttcggtacattgggacgtaatggtatcaatgtaatcgcttgtgcgcagggagcttcggaaaccaacatttcttttgttgtcgattccaagtcattgcgtaaatctctgaacgttatccatgactccttcttcctgtccgaatatcaggtattgaatctctttatctgcggtatcggtacggttggcggtagtctggtagagcagattcgttgccagcaacagaagctgatgatggagaacggattgaagttgcacgtcgtaggtattatcgatgctgcgaaagccatgttcagtcgtgagggatttgaccttgccaatttccgtgaggagttgcagaagaaaggcaaggatagtaacttgcagacgatccgtgacgaaatagtcggaatgaatatcttcaactccgtattcgtggattgtacggcaagtccggacatcgcgtcgctttacaaagaccttttgcagcacaacgtttccgtagtggcagccaataagatcgctgcatcttcggcttacgagaactatcgcgaactgaaaacgattgcccgtcaacggggtgtgaagtacttgtttgaaacaaacgtaggtgcgggactgccgattatcaataccatcaacgacctgattcacagtggtgacaagatactgaagattgaagccgtactttcgggtacattgaactatatctttaataagatcagcgctgacattcctttcagccgcacgatcaagatggcacaggaagaacgctattccgaaccggacccgcgtatcgacctgagcggaaaagacgtgatccgcaaactggtgattctggcacgtgaagccggataccgcatcgagcaggaagacgtagaaaagaatctctttgtcccgaacgacttcttcgaaggttcgctggacgacttctggaaacgagtgccgagcctcgacgcagacttcgaagcccgtcgtcaggtattggagaaagaacataaacattggcgctttgtagccaaactggaagacggaaaagcttctgtcggcctgcaggaagtgggcgccaaccatccgttctacggactggaaggcagcaacaacatcatattgctgactacggaacgctataaagaatatccgatgatgattcaaggatacggtgccggtgccggagtaacggctgcgggagtattcgctgatatcatgagtatcgcaaacgtttaaataagggctattaaaatgaagcatattattatactgggagacggaatggccgactggccagtgaagtcattgggggacaagacgctcctgcaatatgcgaagacgccttatatggataagttagcccgcatgggacgcaatggacgtttgataactgttgccgaaggtttccatccgggtagtgaggttgccaacatgtccgtgttgggatataatcttccgaaagtatacgaaggacgcgggccgctcgaagcagccagtatcggtgtagacctgagaccgggagaaatggcgatgcgttgtaatctgatttgtgtggaaggagagattctgaagaatcactcttccggacatatatctacggaagaagcggatgtactgatccagtatctgcaagagaagctggggaatgaccgcgtacgtttccatacaggagttcagtatcgtcatctgcttgttatcaagggggggaataaagaactggattgcacccctccgcacgatgtcccgttgaaacctttccgcccgttaatggtgaaacccttagtgccggaagcgcaggaaacggcggaccttatcaatgatcttattcttaaatcacaggaactgctgaagaaccatccgttgaatctgaaacggatgtcggaaggcaaggaccctgcaaacagcatctggccctggagtcccggctatcgtccgcagatgcctgctttctccgaaaattttccgcaagtaaagaaaggagcagttatttcggctgtcgacttgattaacggaatcggatattatgccggcttacgccgcattgcagtagagggagctaccggattgtataatacaaattatgagaataaagtagctgctgctctggaagcactgaagacggacgatttcgtttatcttcatatcgaggccagtgatgaggcgggacacgaagggaatatcgacctgaagctcctgacgatagagaacctcgacaaacgtgctgtaggccctatctacgaagcagtgaaggactgggacgagcctgtggcgattgctgtattgcccgaccatcctactccctgcgaacttcgcacccatacctccgatcctataccgttccttatctggtatccgggcatcgaaccggatgaagtgcagacgtatgacgagatatcggcatgcgacggcagttacggtgtgctgaaagaagatgagtttataaaagaatttatgaatcaaaagaatatccaatgaaatactatagtacaaataaacaagcgccgatggcttctttgcaggaagctgtagtaaaagggcttgccgccgacagaggacttttcatgccaatgactatcaagcctcttccccaagaattttacgatacgatagatactttgtcttttcaggagattgcttatcgtgtagccgatgctttctttggcgaagacatccctgccgataccctgaaacaaatagtgtatgacacattgagctttgatgtaccgttggtgaaagtgacggacaacatctattctctggaacttttccacggaccgactctggctttcaaagatgtaggcggccgttttatggcacgtttgctgggctactttatcaagaaagaaggccagaaggatgtgaatgtattggtagcgacttccggtgatacgggaagtgccgttgccaacggttttctgggtgtggaaggtattcatgtatatgtactctacccgaaaggaaaagtcagcgaaatacaggaaaaacagttcactactttgggacagaatatcaccgctctcgaagtggacgggacgtttgatgattgtcaggcactggtaaaagctgctttcatggataaggaactgaatgaacatctgtcactgacttccgccaattctatcaatgtagcccgcttcctgccgcaagcattctattatttctatgcttatgcacaactgaagcgtgccggaaaagccgacaatgccgtgatttgtgttcctagcggaaacttcggaaacatcacagccggattgttcggcaaaaagatgggcttgcctgtcaaacgttttattgctgccaacaatcgcaacgatatattctatcaatacctgcaaacaggtaaatataatccccgcccatctgttgcaaccattgccaatgctatggacgtaggtgatccgagcaactttgcccgtgtgcttgacttgtatggcggttctcatgctgacatttctgctgagatttcgggaactacatataccgacgagcagattcgcgaaacagtgaaagaaacctggaaggaacatcattacctgctcgatcctcatggagcttgcggttatcgcgctttgcaagaaggactgaaacagggcgaaacgggagtcttccttgaaactgctcatcctgctaaattcctggaaactgtagaaagtatcattggcgaagcggtagaaatacctgccaagttgcaggaatttatgaaaggggagaaaaagagcttgcaaatgacgaaagaatttgcagacttcaagaagtatttgctttctgtttgattgggttttaaagcaaggtataaaagaaataattatgcaagatatagtaaacggacgctgtggttggtgtggaaccgacgaactgtatgtgaaatatcatgatcaggagtggggaaatttggtgactgacgacaagacgctgtttgagtttcttgtgctggaaagtgcccaggcggggctgagctggataaccatcctcagaaaacgggagggttatcgcaaagccttttgcgattttgatgtcgaacgggtggcacagatgactgatgaagatgtagaacggttaatgcactttgaaggcattgtgaaaaaccgtctgaaaatcaaatcgaccattaccaacgccagacaattccttgctatacaaaaggagttcggtagtttttacgactacactctctcattctttcccgacagaaagcctattgtcaataccttttgttcattgagcgagattccggcatcttctcccgaatccgatgcaatgagtaaggacatgaaaaagcgcggattcaaattctttggaacaacgatttgttatgctcacttacaggcttcgggatttatcaacgatcacttgaaggattgtatttgccggaaaaaataaatgacgtgcggaaataattcaaatctgtttaggaatgaactaaacagtagtacacaatagtaactccattctcctccttcccgaaggaggagaatggaagatagaaccgactatcatttagctcataacaatacgaaaaggaataaattgctttgagccgctctactagagaattgaaatatccaaaattgctgtcatctgtcaccaaatgatagataacgcactgattataaactaataaagaggtgacagcacagcgtgacggcattgtgacagcatattttgctatcacaatgtcgtcacgctgtgttattatatcctgctacaataatatactgacctcttggaatgataagtcaggaataccttagcttagttagtttccatgcaatgaaactatagttccaaagccttgaaaccaatagtttcaagctgaagaaactttagttccaaactgcagaaactaaagtttcaagcgctggaaactctagttccaaggccgtgaaactaaagtttcattaggcaaaaaaataatagttccacagtaggaaactatcagtagtaaggcagatgaaagaatatttttccggaacagggatttaataagcaaggaatactaaatattctcctgtacaatgaatggtaaactcatctgctgttgcttcattaagtgttccctgccaccagttgctgaagtcgcttagcggataaaacaatccttctccttttaatccttcagctccaaaattgatgatagagacctgctgaccgggatgtgaggcaaaactttgcgtatcactcacaggaataaatgtcccgtaatcagtgactgtccgtacttccataccacttctcatatactccacgagcaggctgatgtttcctaatgtatgatcttcccgtttgccggtagcacctacgatggcgattttccgtatccctttactttgcagataatggacagctttggtctgatcattcgtctcctgatccgaaatttgaaggataatagaggaaaaacgctttttatattccggcaggagcgagtctccatcgcctatgatcacgtcgggagtatgtccgcgggaaatatattcattggcggccccgtcgcaacaaacgacgaattgggcttctgccaaaagacgcaggggaagttcgtgcgcaggatattcaccgttggcaagtatgacggcttggggtatatagtgttcgtttatcattgcatgttcattatttttttccatttgaagtagccaaagatagctataatggagtaaagtccgtacaatgcggaggtgaaatagagatctttatagatataaagtccgcaacagacgatgtcgacaagaatccaggcaaaccattgctcgatgtatttgcgtgccagcatccacattccgacaatgctcaacgccgttgtgaaactgtccagccacggaacgttactgtctgtgtattcgataagtatccgggcgatgccgatgaaagacacgataaacacaaggaatagtggcagatagcatttccacggggtatgtataatggggagacttttcttttccccgtgtccccacatccagaagaaccatccgtagatggcagctatcagatagtagatgttgatgccgaagtcggcatacaaccccgcgtcgtaataaacaaagatataaatggccggcatgatgatgcccgccagccacagatagatactggcgcgatactccagccacaggtagataataccgataaacgtaccgaatatctccagataattcatttccatatttgcttatttattcgttctctacgccggcattacccggatcagattctatgggtatgttctcagcctgtcatgttagggcacccctattgcgtgaatcggcggtaaaattacgaatttagcagaaggaaaacaaggaatcatgtaaaaacaagtcctccgttgaaaaaacgaagaggagatttcagcggcatttttgcaatgccgtgaaatctcctcttctcctcatttgtcgtgtattataaaacttctttttctttggtcagttgctcttcatatagcgtgttaccgatcgtatatttgaggctgaactttttggcggttgtgttgtaggtactttctcctgagtcgataattaccggtccgttttcagcatcccatgctttgatcaaaactttctttacatcattagtgccttccactatctgatccgtgatggtcagttctattgtacccgtttggatatcagccttctcgtcgctctcgttgttcatggcatagaatagtctgacagtgttgactccggtaggcttaatcgttttaggcttctgaatcgtcttcggagtttctccttctaaggtggtatggccactcatctggtaactgcccgaatagtcattctttaattttaatagaatcaacattttatatccggattcacttatcggatatcctgttgtactttctatttcgacggggatgacgtatgactggtcaatcttcagacttgctgtctttatcaacacaggaacttcggcggaaataccttcagcgtgcttgattaccgtattctccaaagaaggaatggaatataaatcagtatccaatgatttataatatttgtcctcattcagaacggtccagtattttttattgtaaatatctaccaactcttcgttgatcttcatctttacgttcacatctcggtctaatgctaatgtaccggaactactgaccgtgaaataagttttcacttcttcgttactgtagcttacttctgtggtccatactcggttgtaagcaccgatcaggtagatttctttctgatattgttctttttcaagcaggtctttttcacaagaagtgatggagagcgttaacaaagaacagaccactattttgtatattgatctcattatatgttcaattttatatgattaataatcagttatatgatagaaaggggaaagttaccaatctccgaatccgtcccatcctggattttgtttcagtttggcatttttatccaatacggctctcggaataggatagaagtacatcttcctgtcaaagctgcgtaatgcatacttatgaactacattgacaacagtatagaattggtctctttcggttgtcttcttagtaacgtccataccttgtaccggtttgttttcttctgtttctgctagtccccaacgacgcaggtcatgatatcttcttccttcgcacgcaaattcgatcatgcgttcgcggatgattaactgacgcatcttcacttgatcgctggcatcggcaagggtgatgcccggcaatccggcacggtaacgaatcatgttgaagtagtacatgatttcctccggattatacaaaatatgataagtggtgttatctgccgcttccgtatattccggttctcctttcagttcattcaatgcttctacatagttcaacagtatttccgcatatctgaatacagggaatgttttcggttttattttagcacctgtatgactggtacagttatcctccggatggatatatttctttagagtatatcccgttaagttatagtcttcgggattggcagcctgttttgcacagttgccattcacgtaatatcctgctgtaaagttagtcacgttgggagcttcggttcctgttaccgaagttgcgggccagaaacattcacagaatccgatagatgcgtagaaacgcggttcgcggtccagatacattttggcaacggttggtctcagctcatatcctgtggcgatggtaggtacagtacccgcttcttcataataatcaggttgttgcacataatcttctccatctttcatgtagtaggcatctatgagtttctgagtgattcctaagccgttccatcctcccagtttcaacgggaaggcgattgaaatgatgttgttgttcaagggagtagcataaataagttcagggtttttcacagccagtgcttctccattgaacatgtctatatacgaatggtaaggatcgattcctcctactcctaacggaaattccgcttgtgacgcctgagaggatgcatacgtgttttcatcgctgggtacagtgtataatgagtaaataccgctatcgataattctcttggaggcagcagctgatttcgcccatttcaccgggtcatattgctgggctatcatgtttcgtccgtcggaagtggtccagtcggcataatattgattgccgttgtaccacttggaagcttgataaagccggacacgtgacatgagggcggctgccgcatatttggtaggacgttcgaactgagtgctcgggcgcgtcgggtccagtagactgtaagcttcttcgaggtctttgcagatatattccacacattcatcgtacgtgttacgttcgaatgacaagttttcaatgttttcatctaccgacagcggctcttcgggaaggatgactgccggtccgtaaagttccaacagatagaaatagaaggaagctctcatgaaatgagtcaaacccataatttcacgtctgtccaatcctttcaggtctttgcattcatcgatgcgggtgaagatagtgttacacttacggatacctttgtagtattgtccccacatgttgtagtaagaatcgttctgcgtaattttgtctgcatacaagtatgtaccggcatattcggctttctgccatgacagaagaacttcatccactgcggtctcgtaagggccgtaggaaccggaaaataagttgccttgagcgggcattaatgccgcggttccccatacataacgttccagataatcttgtctggcaaagatagagtcgagtggagtcaggtcgttaaagtattcatcaactgccagatagttgcatgaagtcagcatgaacgggatgatccccagtgtcgtgcatagaatatgaaggcttttctttaatatctttttcataatagttttcaattagaacgtagctgttaactgtaaagagaaagtacgctgtagcggatatacggcgccgtttttagatgcctgtcccggatcccatagtttcactgaatcccatactgccagattctgtccgacaaattgcagattcatatcactgatgcccactgtccttagtactttattcgttccgatacgataggaaatatccaatgatttccaacgcaggtaagaaccatctgccagccagaaagtagaagcacggttattgttcttattctctccgtaagtcaggcgcgggaaacgtgcattcgggttttctgtagaaggatcccctgaataccatgccggtgtccaacgattcttcgggtcgtttacgatggatagaatgttgccgacttctccgcctgagaagggatagaatccggaaccgccgtataagaagttaactttggctgctccagtgaataaagcactgatagtccatcttttatatctgtattccagtgcaaaaccgtattgaatttgcggtacattggagtgtgcaataggaacaatatcgtcatcgtcaatttttccgtcagcgttcacgtctttatagcggatatctccggggcgtacttcgccgtatgtctgtttcgggcttcggttgatttcatcctgattttgaaataagcctaatgcaaccaaaccgcgcataacaccataatttacatcgctatacgattggtaagggtagcgcaccgcatcttggtcccaatgtacaactttgctgacagcatatgtcatgttggcacgcaccgtgaaagagttgtcttcgtttattttctggttcaggtaaatgttaccatctataccgctactgcgcatacgtcctacgttggtatatgggttggtcacgacgcctacttccgaaggcatcatttttctttcctgaaagatattatcacgagtgtctctgaagatatctaccgttccacctattttatcattgagaaattggaagtcgatacccaggttatatttcttggctacctcccaatgtaagttgttggctccgatttgtttttctgtcaatccattggaaccccaacgactaccacctccaaagttaatcaacgtcagatatgggaaccgacgtccaccaccgatctgatcgttaccaacttcaccataagaagctctgatcttcaaaaagttgagccatcctgcatgattctgcataaattcgtattgggtcgggatccatcctaaggctattgcagggaacaaaccgaattgtttgcccggttcaaagttttcggaaccagtgtatcctacgtttccttctatcagataagcatctttataagagtaagtggctctggcagataacgcttgataacgtttgggaatagatgaaatttcatcatttgcttcggtggtttcggtgctttgcatatagtaatgtatcaaaccggttacacgatgttcctgattgaaaagtctttcataggcaagttgcgattcgaagtaatatctccggtcactggcagcactcttggcgaattgaatgttactggctgataccgtacgttgtgtcattaatgaaccgtcattgtaacggccaaaggccttgtataggtccggcattttggagcggactacgttgtgtatattgttattgttatacgagaacattcctctggcagtcaaacccttgatccattttccgaagtcttgacgtaaggtgaaattgatgttcatagtggtccggtttccctttttaaatccggtatggttcaacaagatatatggtgagatttgttctccgtttttcccataagcaggaagcattccattggaataacgtaaaggcaccgtcaggggagtcagataggcttgtgcggcccagagtgcgtcattgttagttccgaatcccggtgctctgtcttctacaatagctccgtccatagccaatcccatgatcgtcgatgaagttaggttcatgtctacctttgcgcggaaattatatttagcccatttgacattcgtgttgtatttgttaactttgtcttgcttgaagatagcatctttgaatgtacctcctacactgacaaaatatctggcaacttttccaccaccggatacatttaaatagtgctgatgattaatagttacatctttcagtatctctttttgccagttaacgtttggatataagtcattgtccagtcctgctttaataatctccagttctgtcgggctataaagagggtccatattgcttaccactcgggcttcgtttgccaagctggcataatcgtatgcttccagatattcgggcatacggggggaataagagagagtcatactgcttttccaggttaccttggtgcgaccttcctgaccggaacgggtcgttaccaaaacaacgccatttgcaccacgtacaccataaacggctgttgccgaagcatctttcaagatagagaagctctcaatatccgacgggtcgaggtcgttgaggtttccttcaataccgtcaatcaaaaccagcgcagactggttggcaccaaatgtgctgataccgcgaatccagaactcagaaacatcctgccccggttcgccgcttcggtcaacggctataataccgggaaccacacctcccagcatattggctacggaagttgacggagcactgatggcagccggattgacactggtgacagcacctaccacgctgactttacgttgtgttcccatacctacaacaactacttcgtccaatgattctgagtcgggctccagagatatacgcatcttcttatcggtttgagcaaccactatttctttgctcttatatcccataaatgaaacaatcagcgttgtttttggagctaatgatttcatactgaagttaccatccatatctgttatagttccggttttttctttccctttaacagatatgtttgcacccgggagcggatcaccatgttcatctaacacgattccggcaatttgaattggttcttgttgggcccatatcccttgtgttgcatttcctgccaatagcagaaagaaacacagggctaatttaaaatatagtgttttcatttctattccttattaattattcaatagcaagttttctgatgcagtggttgttttgatctgcaatgtaaagaaattcatttttgtccaaatagacaccccaaggctgatcgaattgggcttccaaaggatccccgtctttgtatcctttcccgctacctgctatcgtggtcacgatatttaacttggtgtcaactttacgaatccgatggttattaacatccgctatatataaattgccttctttatcaatagcaattccacgcggctcattgaattgtgcttcttgtacatctccgtcccggaagcctgcgcctgcaccgggaatatattcttcaatgtctccgtctagagctggccaaccgtccgtatcgcgtgtgagcttaaagcgataaactgcacttttactatgcaacacacaataaacatacttatcaaccggattgtaagcacataaaccattggagcctacattatagagtgtaccgattcgttttgctttgttgggatttaaggttcttttattcttatcaaaaggttgtgtccacaattgtcctgtgttttggcggtatatcacaaaagtagaatctacagggtcgagaacaacactatgcatccatcctccgttggctaaaagctgtcccattttatcagccacccagctcacattagcatcgaataagaaacaaccgaagttggcattatcgcatggaccaaatagttgtttcttttctttatcgataaataaaggttggtcgattaccatgccatccagtaaagtgatggttttattttgttcgatggatgataaacgcgttcttccatcagagtcgaatatgaatacattgtcatcattgtctacagctacataccttggagtattgaatgtggtctcaccgagagttccgtctttattgccaccttctttggcttttcctactactgtagatacggaagaagttacaatatatttgaatgttttttcagcattgctgagttcagcttcttttccggcaatctccacccgtacatggctttcccctccggcttgcttgggcacttgggcataaataacatcaggcttgacacctaaaaccaatgcctcccgttcattacctacttcatccttgaagtaaactttcacttggcttttgtcttctccgaaattggaacctttaacaatgaatttggttcgtatgccaccggaatcgggcataaactctgtaaacttgactggttgattaggatcgaaagctgtgcttttcttgtcttcattacaacctactattagtagcaggaagccgaaaaccatccagattagattaaatgatttacgcatgtttttctataagattttattagtttgaaaaaaggtctttttaggctttctatttaaataaggtttaatagattctaattgatttcaatttgacttaagggcttttggctttttctctcatgtgattaattgttttaaatattacagattcaaaggtgtaaatggctatatataattgtgaagcacactttccgttcggttttcaggatacaaacttaggggatttcaaggaatcaggagcatatgcttttattcatccatgtatatcttttcattcaaaattgctttttttatcatttgcttcgcctttctgttgtaatattgattatttttgtgacacttaaactaatatgaatatataatgaagcgaaccgttcgatataccgtccttgttttgattgctattataaattctttagttattactacttctctctatgctgttctgccttataatgaacttcatcagttgaatatgagtaatggcttggtagataacatcattacttgtatctatcaagatcaagatcgttttatgtggtttggatccagtaatgggctgagtcgatatgacgggaagcagattcgcaattttagtgtagacaatgcgaggatgtatgtttccgatataaaagagacttctgatgataaattgtgggtaatagctaatgagtatttatattgttttgatcgacggaaagagaaatttgttcttccgtcttttcaggatggaaaaaaggccatttctgtaagtgctatggaaataacgggggattcacttttttggatagtaaaaggcggacaattgcaatgcttgaaacgacattataaattagtgaaaggtgacttacaaatagagatgaccgtcgaagcaggctatccgttttttttagatgagggggaatctttttcgaatttatgtgcttcacaagacgggcatttcttgtatttggttaccgataagggaaatttgttgttctttgataagattgcaggtaaagtggtccggaagttcaaatactctattaatcctagtgctaatgctactactatcatgagtgaaggggaatatatttgggtttcttctatagtgggtggagtaactcgtctgcatattcccacgggaagatctgattattatcagtataatgaggatgccaggttgtcttctttatcacattcagatgcgtatggggtggttgcgttggataatgattcttacattgcagtaacctggaatggatatactctgttaactcctgaagaaaatgatccttctaagttgtcggcaacgccttatacgaatacctcatttttgcagtaccggaatgtagagacaagaatgatttctgtttattatgataaagagggaatactatggatcggaactagaggaggagggattgtctattttgattttagacagcattcttatatgcaatatcacagcaaaaaacataatgaaatctctgctcaggtagctgacaaagatggtcgaatttggttgggcacttaccatgaaggaattatgcgtagtgaccagccttatgctaaatcgcgaccgctgaacttttctcctgtgggcaatcaaaaggaagtcccggtgttttgtgcaatcaaagattcatgttctaatttatggtttggaaatgcttccggaaacttgatttgttatgactggagttccgattctttccatatatatccgctcaatcatttagggaaaaaggtaaactcctatatagtggccttaatgattgactcccgttatcggttttgggtatgcacttctgccggattgtacttatttgatcatcagacaggtcattttgaattattctcattgcgtgaagccttgaaagaagatgcagagccatgggtcactgctatttgtgaagataaacagcggaatatctggatagggacagcaaaaggtattgtacgattatcacaggtaaatgttcgtccattaaagatggttcatggatatgaagaaaaagaaaatataggagctcgtgtagttagtgctttactgactggtactgacggaactgtatatgtgggttataaaaatggatttggaatcattcctgtgggcgaagataggataacgtctttttatacagtaaaagatggactttgtaatgattgtatagattgtatagtggaagatgagaagaagcgtatttggttggggagtatatccggtatctcaagatatagccgacaacaacatgtcttctacaactattatatttctagtagcaataaatctgtgatgttgtttaagaatactttattttggggaaataacaagagcttaacttattttgaaccggaaatactgacatctgccaccattgccagcaaaactcttttaactggattggaagtcgataataagcaaatcaatataggtgagaagataaaagggcaagttgttttggactcaaatattgcatcaattgaccatttggaactggtcaatgcaaaccgtgatttctctctccttttcaataatctggctttttcgaaggatctgcaaaaatatagctatcggttatatccatatcaaaaagattggattgtttctgaagcgggtaaggtctcgtttaccaacttgtctgccggttattatatttttgaagtcaaaacattgttccctaataatacggaaggagacgttactgcattgccgataacaatccttccacattggagccagaccgtttggtttcgtttgcttttgattttctcggttttatttttggttggttatattttctatagtttgttgcggcggcaacgtcgtttcaaaaaaatgattcaattgaaacatgaactgacgattgcaaatttggagagaaacgcagaacggcatatacgggaagaacgtgagaatttttttatgaatgctgctcatgagttaagaactcctcttactttgatacttgctcctatacatgatataatgaagtccattaccccatcggataattggtttgattcatttagcagattgcacaagaattgtctttctctacagacactggttgatcgtctgctatatgtacagaagatagagggaggcatgataaaacttcatttgtcagaatcggatataaaggagattgttagccgggtggctaatccttttctgcaaatggctatggtcaagaagcgggaatttttggtccaggtggatacagtgcctttgtatttatgggtggatgtggcgaaaatagaatcagctgttcaaaatttgttatcaaatgcctttaaatacacttctcagaatggacgtattgaactggctgtgtcagaggcggaaattgacggaagaccttattgccttgtaacagtgtctgataatggagttgggatacctgatgatttgcaacagcacgtgtttgattcgtttgtaacagggaaacgtatcccgcaatattccacgtcaataggtcttggattacatattgtaaagcatacgatggggttgcatcatggatttgtaacgttgaccagtcgtgttggagaaggcagccgattcgttctgcacattccgatggggctttctcattttgcgccgggggaatatgaaatggtacctgatccgatgaagggggatttgttggaagagtgtccggcagaagaacgtccgatggaagaagtagtagaagaaaagaatgagactatggaagaacccgttaacagagtgaaaaataataaggaatttttgttgattatagaggaccacgatgagatgagagaatatttatgcagtctatttaaagaagattataatgttattgaggctggaaatggagaagaaggggtggctatggctgataaatatatacctaaattaatcatatctgatataatgatgcctgttaaagatgggtttgaatgtagtcgggagattcgtgaaaataagcggacttttcatataccggttatctttttaacagctaaagcagaggatgctgaccggttgaaaagtttacaaataggggtagatgactatataatgaaaccttttaatccggagttattgaaagagaaggtgaaagcgttgatagaacaacgtgatctgttaagaaaactttatgcgaaaactcttatgctggatgaagaggtactggaatcttcagaagatgttcaggatgtttttatgcctaaaatgcttcagattatagaagaaaatttatcaaaccggaattttacaataaaagtgctgacggacaaattgaatatgagccagccgaccctttatcgcaaggttaagcagaaaactggtttgtcgattatagaggtgattcatggagtacggatgagtaaagctgcctctattatcatgagcgggcgatatagcagtctgacagaagtggcggaaatggtagggtatgattcgatgatttccttccgtaagcagttcgttgcacagtttggggtgcttccttccaaatatatggaagagaaaatgaggaaataagaagccgcgttccatgttggcggcttctggcttgtctgtttgaatagttattgttaaaaacggaaagagacatgggccataacatttgtacccgcttgcgcagcgtatccggcagagtctattctgtgattcacatccttgtcgtaagaactggatgcccaaccgttgttctcgtattcttcgttgaagaggttgtagacggtcacacccatagttacttctttcaccacttttcggggtttgaatgtataggccagatttaggttgctcacgaaatacttatccagagtcaatgcttccacttctgcatttgtcatatattgcttgccgacaaattgggattgaagggctgcttcgaatccttgataggtaaaagcaaaacggttgttcagcaggaaatccggtgaaaaggcgatgcgagtactcttatgagaaacgcttacgacgtccagtaagttccagccatcgtaaatgggaatgttttctacaaaattcttgatacggtttttgctccatgtcgcattgatatcccattggaaccatttacagggcttgatacctagcatcagttcgattcccatccggtagctgtccggaacgttttctgtcagggcttcaccgatatcgttcaaagctccggtgaggacaagctggtcggtataatccatgtagtagaagttggcgcctgctgtcagccaatgattggcgaatgtgtatccggcttcgtagtcgagcagcttttcagctttcggataactgtcgggatcgccatccgtataattatttcttgtcggttctttttgagctacggagaaagaagcgtagacacggtgattggagttgatattccagttcagtccgactttcgggttgaaaaagtcgaatttcttgtctacggccagcagacgcaacgcacttttattccagtcgtatttgtcatttgctccgtcgatggtgtagtcgatgtgccggtattgc

SEQ ID NO: 4629 - DNA, 4331 bp, Unknown
  gut microbiota DNA sequence
gatgttcctgcgccacgttgcacttgcatatcctttacggaagaagagaagtcgggcatatttacccagaacaggttgtggctttcggcatcgttcatcgggatgccgtttacagtgatattgatacgcgtgccgtcagtgcctcgtacacgaagagtcgtatagccgatgcccgatcccgcatccgatgtggtcagcgtggaaggagtcatgctcagcaggtagggaatatcctgcccgaagttcacttttttaagttcggctttgcctatattggtaaatgctacgggagtttttgctgtagcacgtgtggatactacctgcacttcttgcaggttgattactttcagactatcctttgcactcgtttgtgcatggacagggaagcctgcgcccaataaggcgacggccatcatcatcatttttttcatcttgcttattaattagttctctacgccggcattacccggttcagattctatgggtatgttctcagcccgtcatgttaaggcacccctacttagtgaatcgttggcaaaattactgcttttgcgggaggaaagcaaaaaaaacttttagatttgctaaaaacaatataactttgtagtttgttgaaatatgacaagtcagctatttattcattttaatataattatcaaattatgctactattatttcaagcgacagcaacacagcttgcggattctacacaaatcgtcgcagataaattaatggaagaagcgatagccaatgcggacggattggataagctttctctgatcacccagcaattggtagatttcggtatccgtgccggagaacgcatcctgattgcaacccttgtcttcattgtcggacgcttcctcatctcgatgctcaaccgatttgtcggacgtctgatggacaggagaaaggtggatataagcatcaagacttttgtgaagagtctggtaaatattctgctgaccattctgttgattatctccgtagtcggtgctctgggagtcgaaacaacttcttttgcagccctgttggcttctgccggtgtggctgtcggtatggcgttgtccggtaacttgcagaactttgccggcggactgatcgtattgcttttcaagccttataaggtaggagattggattgaaagtcagggagtttccggaacggtcaaggaaatacagatatttcacaccattctgactaccggagataataaagtgatttatataccgaacggtgcaatgagcagcggagtggtgacaaactataatacacagacaacgcgccgtgtagaatggattgttggcgtggattatggagaagattataataaggtacagcagattgtccgtgatatactgacggccgacaatcgtattctgactgatcccgccccgtttattgcccttcatgcgctggatgccagcagtgtgaatgtggtagcccgtgtgtgggtgaatacggcagattactggggagtttattttgatataaacaagactatttatgaaacctttaatgaaaaaggcatcaacttcccgttcccgcaacttaccgtgcatcagggaaactgatcactataagatatatactaaaacgagagagtttcacttcggtgagactctctcgttttatatgaacaaattgtctggtgtgattggaaaatttcttttttatttgatgccaaagtcttctgcaaattcatatcggtcttctttgatccccagtacatggttgattttccttcttttttcaaggtccttaaagtagctttctactacctgatagagatcaaaattactggttgatcctgcggcaagatcgagtgactccaccattttctctactgcctggtggattttccctgcgtctatcagatgcagttcgttgctgtgtattaaatatttctccataactgcaatgttttaatgttatattgttataacgtatcatagtgatggaaagttcaatccccgaatcttcattgcgtcttgttgtcaatcacattttaacagacaaataggttagaatctaatgtcagattttggcgagtgcctgttccagatcggctatcaggtcattgatatgttccgttccgatggatagacgtacagtgcccggataaatctcctgttctgcaagttcctgcgcattaagttgcgagtgtgtggtacttgccggatggatgactagtgatttcacgtcagctacattggccagcaacgagaaaatctccagactgtcgatgaagcggtgtgcttcttcctgtcctccttttacttcaaacgtaaagatggagcctgcaccattcgggaaatagcgttgatagagtgcatgatccggatgatcggagagtgacggatgattgactttcttcaccttcggatgattattcaggaagttcaccacttttagcgcgttttctacatgacgttctacacgcaaagaaagtgtttccagcccttgcagcaggatgaaggcattgaacggactgatcgttgctcccgtatcccgtagcaaagtggcacgaatgcgggtgacgtaagcagccggaccggcagcgtctacaaagcgtactccgtggtaactcggatcgggctctgtcaactgtgggaatttacccgaagctacccagtcgaatttaccggagtcaacgattactcctcccaaggaactgccatgaccaccaatgaatttggttgcggagtgcactacaatgtctgctccgtgttcgatggggcggattaagtagggagtgccgaatgtattgtctataattaatggaattttgtgacggtgagcaatttcggataccgcttctatgtctataatattggaattcgggtttccgagtgtttcgataaatacggctttggtgttctcctgaatcgctttctcaaagttggaaaggtcgctcggatcaacgaaagtggtggtaacgccataattgggcaaagtatgtgccagtaagttatagcttcctccgtaaattgttttggcagctacgatgtggtcgcctgcacgagtaatgttttcgaaagcataagtaatagcggcggcaccggaggcaactgccagacctgctacgcctccttcgaggacggctacacgttcttcaaaaactccttgggtggagttggtcaggcggccgtagatattgcccggatcttgcaaaccgaaacgtgcggctgcatgagcggaattgtggaatacataagaagtggtctgataaataggtactgcgcgtgcgtctgttgccggatctgcttgttcctgtcctacatgaacctgtaatgtctcaaagtgtaaattctttctttccataatcgtatgctttttaagtttgatattctctctttattttcttgcaaagttatgggatgcagatatatcgaacaatatatagtagaaatatagaaaataatgctatttttgtatcgttatacagaataaagcaactgctttattcttaaaaatcacctgttagaagaatatttttcttatggatacttttgagaaattagataaagtggatttgcagatactccgtactttgcaagagaatgcgcggttgacgaccaaagagttggctgcgcgggtcagtctttcatcgactcctgttttcgagcgccttaaacgtttggagagtgggggatatataaagaagtatatcgctgtgctggatgccgaaaagctgaatcagggttttgtggtcttttgcagtgtcaagctaaggcggctgaacagggacattgcggctgagtttacccgaatcatacaggacattcccgaagtgaccgaatgttataatatatcgggcagttacgattacttgctgaagatccatgctcctaatatgaaatattatcaggagttcattctgaatgtgttgggaaccatcgatagcctgggttcgctggaaagtacgtttgtgatggcggaagtgaagcaccgatatggaatacatatttagtgggaagattgatgtatttcctatttttgcgactctttgttttcggctcaggtttccggtggattgccgataatgtctctgtataagctgccgtcatggtccttgtattttgcgtattggtagaggcggaccagtatatcactgtaatcaagaatggctgtatttgatttctgtgataaattggtgcccaagataccactgcctatgataccgggattgtataatacggtgtcttgtctgatagagttcattatcagttctgcacaaatatagtctttaatccttgcctcttctagtcgggtcgtgatgtatgagttcagatggcttttgtcatgttgagtcataaagccgtaccata

SEQ ID NO: 4630 - DNA, 28841 bp, Unknown
  gut microbiota DNA sequence
gaaggaggagaatagagatagaatcgactttttagtcacccccattcaagatagaatcgattttttagcccccactttagctcttttgacaccccttcatgaattctcttaaaggtatcttacggaatggaataaaaagtgaatcagcggcggcaaaattctctattttttttcttattaattctatttctttagaatagaattatatactcttctctactctactggtttccattcggttttcgcgccctgccagaaggcgtttcagagcttttagtttcacaaattaagagttgtttttcccctctatttttcgcctgtttttttcatcgaattctattcggatttatacttcaaaacaatgttgggataaaccaccccgtccgcacaagtaaactgcgcaaaaagaatgaaattacggaaaaattcggagttgcggagaaagaattccggcacataatgaacctgatgtccggactgttcgagtacgtgtccaaagtccgccatcaacatgaaatgatacgaatcggacaatccgtccgtccccgcccgataagccaaagcgccgtcaagcacttcgtcattatccagctggcggatatatcgtgacaaactatcttcatcgggggcaagcagtaaacgtccgccataaaatgtagcgaaaacatgcaaggacggctctacaaaactggttagttgcgtaaacaacgttgtttgaggcaacctgtacacagggtatgctttagagggagtataacaaaaagttatacgtgaattccggcctgttccttcctctgccggagccgtatttaccaaagagcgcaacatcctttccgcctcagccacatccatcaccgagagacttaaaacagccgcaggccccatcagagagtcttcccgctggaaaagacaagccaccaaatcctgccccgtattctctgccagataacgcgacaattcccgatcccgattcagcacttcactcgttctgcctgccgtcgcatattcctgcgtatcgccataggaaagcagggatgcccagtccgtaatgccctgtttactgaaataaaatgcagtggagggcagtgtttcgcccggaaatcctttgacagattcctgctggcggattacatttataaagttaaaacaagtatctacataatggctgactccggagaaataaataaaatcatccttcagcttcatatcgaactccgtccatcccatcattcctgccagacgagtgtagacggtagcaacagtcggacttttcttcggtgcccgcacttctttaaaagcagggtcggtagccagcgacttgccggttttgcggatatctatcacctcctctatcagctttttctgacaactgagcaccagaaagtcttccgtcagatagcaggcgagaaaatcaccgtccgccatcggataaataatgatatcttcacccttataatcgaatgttttcggaggatagcccgacgaaacatatttctgcacaaaacggtcgatcagcgcacggtccccattccccaaccggcagtaaagcacctgattacgatcattgtccggctcatgaaaactgatcagcatctgattcatttgcctgctcagaccgtgaggagcatcttcgagaagagaataaagatattgtttcagataagaaaagagtttggaaacataaagatactggtgatcccgactacaggtcagctcatccacttccattacaaattcggctacatcttccgtcgcaaacactgctgaaacagaggacggaaccaaggtatagagatcaaaatccttctgatcttcggcagccgacaacctaaaaaaagagtacaacgcaaaacctgagcacaaaagtacaacagaagaagtgatcgctattttcactatcgtacgaagtttcataatatttgctgtttatcggctaggggcaaaaataataatttctacaaagaaaacaaaacttttgctaaaaaaatcaccaataatcagaaaatgatttccattccgtcatatgtaaggtgaatattttcaggaagccccttctctaccttcttgtgcagccccatatcatgactcatgtggatgaagtatgtctcctttgcccgaatacgttctgccgccttcaatgcctcctccagattctggtgggtgggatgaggagcgatacgaagcgcattcattatcagaacatctatcccttctaattgttcatacgattcttcgggcatggtgagcatatccgtgatataccccagcctgccgatacggtagcccagaatcggcagccgaccgtgcatcacccgcaaaggcaccacttccgtatggtggatggaaaaggcgtgcccggcctcaatttcctgcaagggaatatcaggaacaccgggataacggtgatcgacaaaacaataaggcatccgcaaacgcaatgcgcgtgccacatattcttcggcatagataggaaccgccccgaaacggcagaacggacgcaaatcatccaatccgcccacgtgatcataatgttcgtgcgtaatgagcacaccgtctatcttctcaaaaggaaggtgtaacacctgcgcccgaaaatcgggtccgcagtctataagtatccgcgcatcttccgtctcaacgattgcagacgcacgcagacgattatccttcggatcggcagaagtgcagaccggacaggtgcatccaatctgaggaactcccgtcgatgttccgcttccaagtattcttactttcatttcccaaccaaatttacttccggatgaatgtctatgccgaatttcgcacgaacagaagcccgtaccgcatccgaaagcgcaaggatgtcgctgcctttcgctccgccccgattaacgagcaccaaggcctgcttgtcatgcactgccgccggacctaatgcttttcctttccagccacactgatcaatcatccatcctgccggaatcttcactcgtccgtcattcagttcgtagaaggggattcggggaaattcctgctgcaaggcttccagtttttcgcgcggaacgatgggattcataaagaaactgccggcatttcccatcactttcgggtcgggcaatttgctttcacggatatcgataatcactttccggagtaccggcaaggtcagttcgggatacttctcgagttcctgacggatggtgccgtaatctaatgtataacgttcttccttgctgagccggaagcagacataggtcacaaatacggatttattctccggacgtttgaaaatgctgtcgcggtaggcatagccacattcatctacagcataaacacgctcctcaccgtgaatgttcactgtttcgacagaggtgatcaggtctttcacttccacaccataggcaccgatattctgcacggcactcgctcccacttcaccgggaataagggagagattttccgttccataccagccatgctctacacaatatcctacaaaatcatcccagaccacgcctgctcctacccgcacggctacactccgttcatcctcttccgtcacctcgatcccttcgatgcgggaatgtaagaccagcccttcatagtctttgacaaaaagcaggttgcttccaccgcctatatgcaaaaaaggtgtcgtaagggcaccttgagctatcaatgtcttcagttcttctaccgaagcatattcctgaaaccgttcggcatagacatcaatgccgaacgtattgtgtgataaaagagaatacatatcttccgttttttcgttgctaaatactggtatcttcaaacttatacagttgccattcgcctgctttccgcctgaaatatagaatattagagaagccgtttccgattcccttcaaggcgagaatctttgtcggcgagttatcatcattccgctgtccgtaattgatattcgaaaggcggtctgtaggcaatgccggcttgaaagcaaaccactggttcaaatcaagagaggtctccagaatagagaagtcatcgtccggatctgaggtgacaaaagccagaggctcctgcacacgccggctttgaaaaaggctgtcggcagcaaaatgactgaaaaactccacaaagtcttcattttcattccgctcaacagggcgcagattgatagcctccagtatccatgcccctttgatacgctcaaaataatactttttcaccattcgggttttcacgaatatccattccacctgaacggaggtcagtgaggtgtcccccaccaaatccatgtcttcttctttatcaaacaggagcgtataataatgctgtttggtaaataagtcatcatgcttccagttgcgttcttcgatattggttttctcatctcccttgtaatagggcaacggaaacttgacacgctgacgctgcaaggcatcatcggaagcaaaattatagataaaatcgtcgaaagattcgtccgcttctgtcggtttgggctcttccggcaattcctcctgatggatcgaatcggctttgtgccggatagaatccacctcttgagtgatagatgcaaaggggtcgatgttcgttttcttgtttccacaggaaccaaggatagtgagcaccagaacccccgcaattagttttttcattttttcagtttctctcttagcttttcaagcatatccaccgtcatgctttccagatcgtaagccggcttccacccccactcctcgcgggcgcaagtgtcatccagactatcgggccagctgtccgctatgcgctgcttcaaaggatctacatcatagatcatctcgaacgcgggcacatgcttcttgatggcatggaaaatcgtctcagggtcgaaactcatagaggcgatattgaaagcgttgcggtgtatcagcttggtcggatctgcttccatcagcatgattgctgcgttcagcgcgtccggcatatacatcatatccattaaagtgccttctttgatagggcacacaaatttttctcctcttactgccgaataataaatatcgacagcataatcggtggttcctcctcccggaggggtcacgttcgaaatgatgcccgggaaacggacagcacgtgtgtcaacaccgtatttgttaaaatagtagtcactcagcaactctgtcgttaccttggtgactccatacatagtacggggacgctggatagtatcctgtggtgtctgtgtatgaggcgtgcttgcaccgaacgatccgatagaactgggggtaaataccgcacatccctgctcacgcgccacttccaaaacattccacagtccgtcaataccaattttccaggctagcttcggcttggactcagccaccaccgatagcagtgcagccaaattatatatggtatcaatgtggtattccttcaccaccgattcaatcatttcaccattcgttacatcgacaactgccgacggtcccgactcttttaactctcctttgggctctgcaccctggatgtaacctgctactacgtttgtgtttccataacgcctgcgtaactccatcgtcaactcggatcctatttgtccggtggctccaataatcaaaatgtgtttcatttttccttttaaataaaagtgttaagctaaatagtgcgcaaagtaagcacttttttttcagatttaaatcaaaaagatattgtttattccaagaaaaatcgtgtcctttgcaccattaacttaatcactcaaacattatgtacggtaaaatgaaagaacacctcagccagacactggctgaaattaaggaagccggactttacaaagaagaacgactgatcgaaagtgcgcagcaagctgccatcactgtaaaaggaaaagaagtgctgaatttctgcgccaacaactatctgggactgtccaatcacccccgtctgattaaagcttctcaagaaatgatggagcgccgtggatttggtatgtcatctgtccgcttcatctgcggaacgcaagatatacataaggaactggaagctgctatctcggattatttccagacagaagacaccattctgtatgcagcctgtttcgatgccaacggaggtgtgttcgaaccgcttttcagcgaagaagacgccatcatctcggactctctgaaccatgcttctatcatcgacggcgtacgtctttgcaaagcgaaacgctatcgctatgccaacgcggatatgaaggatctggaaagatgcttgcaagaagctcaggcacaacgtttccgtatcgttgttaccgacggtgtattctctatggacggaaatgtagcacctatggatcagatctgtgacctggccgagaaatatgatgcactcgtaatggtggacgaatcgcactctgcaggtgtggttggcgctacgggccacggcgtcagcgaactgtacaagacttacggacgcgtagacatctatacgggaacactgggcaaggctttcggaggcgcattgggaggatttaccaccggccgcaaggagatcatcgacttactgcgtcagcgcagccgtccttatctgttctccaactcgttggctccgggtatcatcggtgcaagtctcgaagtattcaagatgctgaaagaaagcaatgcgctgcatgacaagctggtagagaatgtaaactatttccgtgaccaaatgacagctgccggatttgacatcaaaccgacacaaagtgccatctgcgccgttatgttgtatgatgccaaactctctcagatttatgccgcacgcatgcaggaagaaggcatttatgtgacgggattctattatccggtcgttccgaaagaacaggcacgtatccgtgtacaaatctctgccggacacgagaaagcacacctcgacaaatgtatcgctgcttttattaaggttggcaaagaactgggaaccttgaaataagtaataagtaataggtaataggtaataatcgtagctgccggtagctttacccgcatgacctattacttattacctattacttattacctattatttattacctattacctatttttcaagatggaagaacttacgctcactactcctgctttgcttttttcggctgtttcgctgattttgctggcttataccaatcgttttttatcgtatgcgcagctggtgcgacagttgcgggaccgctatatggaaaatcctacggatatcacggtagcacaaatcgagaatttgaggaaacggttgaatctgacacgcacgatgcagggactggggatagcaagcctctttttctgtgtagtcagtatgtttcttatttacatcggactgcagttgttatcggtttatgtattcggactggcattgatactgttaatcgcttctttgggtgtatccttccgcgaaatacagatttctacccgctcgctggagatttatctgggagctatggaaaaaggaaagataaagaaatagcccggcagggaagttgataagtaagataaaaaaagaagctgtctgaatataaacccaaacagcttctcttatataattttctatttttcagatcattatcagcgttgtcccagttgtgaatcaacaaagaaaataccggtatcaccagctttcttgattttatccacaattccctgtgcagtagcttcttcttctacctgttcgcggacaaatccccacaagaaatcctgagtagctttatctttttcagcagcagccacatctaccagcttgtctaccaatgcagatacatggcattcgtgtttgtaaacgtgttcaaacacttccagcggagtaccccagccattgggaaccacatcaatcttgtcaactatagcagttccgccacgtttgatgatgtaatcggccattgcataagcatgtcccatttcttcctgagattgtttcttcatccaatgtgcaaagccactgaaaccttctttctcaaagtagaaagacattgccagatacaggttagaagaccacatttcagcagtgatctgctcattgattgctttctgtaatttttctgaaatcataatcgtatatttttattaagttgttaatgtagttttcttttgaactcattacaaaaataacaagatttcagttaaaattgttccaagctccctgcatttttaaactacattcacattttatttacaccagctcgtccgaagtgtatcctttcggcagttcacgacagttgtatccggatgccataatctcaccataggcacctgcggaacgaagtgcaatcaggtctccccgcttcactttgttcaggtcaatcgctttaccgaaaacgtctgatgattcacagatcggacctactacgtcataagcctctacaggttcttctgaagtgatgttttccatcttgtggtaagcctgatacaaagccggacgaatcaggtctgtcatacctgcatcgaggatggcaaatttcttcttcgttccctgctttacatacagcactttcgatatcagagagccgcactgtcctaccaccgcacgtcccagttcgaagtgcaatgtctgataaggacgcagtttcagctgtccggcataggtagcaaaatagcttttgaagtccggaacggactggcggttaggatgaccgtagtcaatgcccagaccaccaccgacattgatatgctctaccagaatacggcgggcttcgagcttgtcctgcaattcattcacccggttacaaagagcgatgaaatcgcccatatccaatatctgtgaaccgatatggaagtgcagaccgatgaattttacattcttcatttccaaagccacatcgatcaccctgtccatgtcctgcatactgataccgaatttgttttcagccagaccggtggtgatattggcgtgcgtatgcgccccgacatccggattgatacggaaagcgacattagcgatcttattttgagcggcagccagttcgttgatgacttccagttcggggatagactctacattgaaacagaagatgccatattccagtccgaggttgatctcccaatccgctttcccgactccggcaaaaacaattttattggcagggaatccggcacggacagcggcacggatttctccgccactcacgcagtctgctcccattccgctttcacggataatggtaagtactttcggattggcattcgccttcacggcataatgtacggaatagctaggatatttggcaacctcttggttaatagccgacaatgtatcacgcagcactttcgtatcataataatagaaaggtgtctgcaaagtacggaatttatcgattggaaatattcctttcataattcaagaaacttgtttagttagttaaaaagagcgcttttatcagtatcaataaaagcgctcgtattatttgtggaattatttgttgttgaaaagcatatcgctcagcgactgcaacgccgtcttcttatcgcaatcccggataaggaaggaaatgttgtagttacttcctccaaaggaaatcattcgtacaggtatatcccgcatcgcatcaagcgctttagcttcgaaaccgacattctcccattccaggtcacctactacacagataatacacatatccttgtcaacagtgacagtaccgtattttttcaggtcgtccagaatctcgttcagatgcttggtgttgtctattgtaacagatacaccgacctctgaagtacagatcatgtcaatagaagtctgatagctttcaaagatctcgaatactttacgcaggaaaccatgagcaagcaacatacggcttgatttgatcttgatagctgtaatattgtttttggcagctacggctttaatcttacctttctccgtgtcattagaaattagtgttccgggagcatccgggtccattgtattcagcagacgtacaggtatattggcatatttagcaggctggatgcaagtcgggtgcaggatttttgcaccgaagtaagccagctcggctgcttcttcgaaatgcagctgacgaaccggcgctgtcttgtccacaatgcgcgggtcgttattgtgcataccgtcgatgtccgtccatatctggatttcggaagcctttacggcagcaccgatcaaggatgcggtgtaatcgctgccaccacgctgcaggttgtctatctcaccgtaagcattgcggcagatgaaaccttgtgtgatgtaaatctccatatccggatacagttccagttgtgtctgcagtttctccttaatatatacagggtccggttccgcgttcttgtcagtacgcatgaattccaaagccggaagcaatacggacttcacaccgcattcctgcaggtagaagttgaccatagccgtagaaataagctctccctgtgccaaaaccactttctcttcgaacaaagtgaaaaggtctttagtataggagcggatgtagtcgaagtgagacttgatgacttccaaacctttctgtttatattcctgagttgcaaaaagctcatcaacgtgctgtttatattttgattccagcttattgataatctcgttggcaccctccggattcttcttatacagatagtccgaaatttccaccaatgtatttgttgttcctgacattgcagaaaggacaacaatcttctgttcaccatcggtaatcaatttggctacttccttcatccgctgagcagaacccacggaagttcctccaaactttaaaactttcattttcgttactgttttagttatctatatttaaatctatttctattgttctctgtctgggcatgtattcgtctgtcacatccgttatacgatgttcggaacagcggtatacactgccgggatattctttcagcaattgcagattgtgcgttgtcatcactaccgacgaaccggattcgcagatgttgtgcaacaattcaacgatggacttgcctgtttccacatccagatttccggtcggctcgtctgccaggataatagccggagaattgagcacggcacgtgcgataacgatgcgttgctgttcgccgccggaaagttcgttggggagtttatagcccttgttggacattcccacgaggtcgagcacttcctctattctttcctgaatttcccgtttgttcttccagccagtggcacgaagcacaaattccagattgttgtaaacggtacggtccgtcagcagctgaaagtcctgaaacacaattcccagctttcttctcaactgagggatatgcttgcgtttgattgaacgcatattatagcccagcacttccgcttcgccgtcgattacgtccagttcgccgtaaaaggttttgagcaggctcgttttccccgaacctaccttcccgatcagatagacgaactctcctttgtgcaattccagattgacatcgctcagtacacagagttcctgttgatggatttctacgtttttatattgaattaatgcttcttccatgtactgctatgtctttcctgcaattcgcgtgcaaggtcttcgatccgatagccttttgaagttaataatacaatcatgtgataaatcaggtcggctccttcatagatcagacgttcgtttgttccattcgtagcttcgatcactgtttcgacagcttcctcacctactttctgagcgatcttgttgattccggattcgaacaggctggtggtgtaagaaccttggggcatttcttcgtgacgtttgtcaatgaaatcctgcaatgctttcaggaacataaccggttcttcgtttttctcaccccagcaagtatctgtgcctgtatgacaaacaggacctgccggatctgcctggatcaacagggtatcgttgtcacaatccgctttgatagataccacatgaaggaagttgccgctttcttctcctttcgtccaaagacgatttttggtacggctgaagaaagttacttttccggtttccaccgttttatcataggcttccttattcataaagcccagcatcaagactttgcgtgtctcgttgtcctgtatgatagccggaacaagtccgttcatcttatcgaaatccaattccatcttatattaagttctaattactatttcaatttactataccgtttgtgtgagcccatgccgcctcaccctctgatggttattccttcgccgcaaagatacgattttaattcgggaattttaatttctccgaaatgaaaaacgctggcagccaacgccgcatctgcttttcctactaaaaaagcatcacggaagtgttctttcagccctgccccacccgaagcgatcacgggaatagagagttgatcggccaaggaagcaagcgcctcgttcgcataaccggtcttcaccccatcatggttcatgctcgtaaacaggatttcgcctgctccacgctcctgagcctctttggtccatgccagcaattctttatcggtttcgatacgcccgccgttcagataacacttccagccgttttctgtttgcttggcatctactgccagaacacaaacctgagaaccgaagttcttggcaatgtcatcaatcagctgagggttgcgaatggcggaagaattgatcgagatcttatccgctccggcattcagcaggcgatctacatcgctcaattcattgatgccaccgcccacggtaaacgggatattgatattggcagcaatccgctttaccagttccgtgaaagtcttacgtccttcatgacttgcggtaatatccagaaacacaagttcatctgctccttgttcgctgtaagcccgccccagctctaccggatcaccggcctggcgcaaattgacaaagttcgttccttttacggtctgtccgtcttttatatccagacagggtatgattctttttgctaacacaattctatcttatttactatttgacaatttagattctactaatccgagaacctgcttccttatttttcattataacagggttcttcctttcattttagcactcctgattataaaaatatacgcaaatctttcaacgttatatgcccttcgtacaatgctttaccgaagatgactccgggaactccggcttcattcaaggcgattatgtcatccacattgctcactccgccactagccatcaggtagagattcggaaacttctccagcatttctttatacaaatctatagaaggacctttcagcattccatcacaactaatatcagtacaaataactttctgaatacctttatttatatagtcttcgagaaatgggaaaagctcacaggcgctttcgtctttccagccgtttacagcaatcttatgttccttgacgtctgctccgaggattattttctcactgccatatacttccagccaatggcagaacagctccggatctttcacggcaacgcttccgcctgtcaccatctgagcaccgctttcaaaagctattttcaaatcttcgtcactctttactccaccgccaaaatctactattaaagaggtacgcgtagcaatctgctccaatacccgatggttgactacgtggtgagaagcggctccgtccagatctaccacatgaagcctgcgaaccccgttcgcttcaaactccttggctacttccaccggattttcgttatagaccttcttactatcgtaatctccctgagaaaggcgtacacatttcccgtcaataatatcaatggctggaataatttctatcatctgtttatatacaatttgatcatttacgatttactattttagctgttcactccatcttcttatacctgtccttttcttcttctccgaaaagccggaaatagtttataataaacgatgaccgagtttattataaactatagcggagtttattataaactgttgcaacgtttattagagatccagaaagttcctcagaaccctttcacctgtcttcccgcttttctccggatggaactgggtggcataaaagttatctttatgcaatgccgcgctaaacggatggatataatcggtttcagcagcagtgaagtcacaaaccggcacatagaaactgtgtacaaagtagacaaactcttcttcggtgaatccttcgaacagtttgctgtttgtcttaccaatcgtattccagcccatatgcggcactttatcttcatgcttctgcggaacaaaacgtttcacgtctacatcaaagatattcaggcagtccacctcaccttcttcggaatgccgacacatcagctgcataccgaggcaaattccgaacacaggctgacgcagattcttgatcagctcgtcgagccctgttgctttcaggtgattcatggtagttcccgcctctcctactccggggaaaatcactttatcggcagattgaagtatttctttatcggcagtaatcactgcttctactcccaaccgcttcagagcatagtccacagaacggatattcccggcattgtattttacaactgctactttcatcagctaaatattactgttttatttttataagccaaaatcttacgttcgatatgcttttgtaccgcacgcgaaagaacaattttttccaggtcctttcctttatttacaagatcttctatagagtccttatgtgtaatgcgtactacatcctgctcgatgatcggacctgcatccagctcagtcgttacataatggctggtcgcaccgataattttcactccacgctggaatgcggcatgataaggtttcgcccccacaaatgccggtaggaaggaatgatggatattgataatcttatttggatacgcattgatcatctgttcggaaatcacttgcatataacgtgccaacacgatgaatgtaattttatgtttggcaagcaattccatttctttgcgttcctgttcttctttggtctccttggtgatggggaacaaatagaaaggaataccgaaacgctctgccacgtgctgcaagtccggatggttgcttataataagaggtatctccacgttccactctcctgccgtgtagcgagccaacatatcgaacaggcaatgagacattttagaaacgaatatagccatacgcggtttcacatccgagaaataaagacggaaatccatttcatacttctgcccatatagcgttctgaaataatcttcaatcttttcctgcggaaccagaaaatctttcaattcccattctatacgcatgaagaagatgttctccacatggtctacatactgatccagatagataatatttcctttgtttaccgtaataaagtctgtcacttccgcgaggattcccggtttgtcgggacagtgcaataacagtttggctgtagtcatcattctttttactaatttactattccgggcggaaattcttccacctatctaattttagtgcgcaaaaataacgatttattgcaaaactacgaattattcaagcagaaagttgatataaaaacggtgatttcttacagatagaaagatatccaagactatttccaaagaagaagatgacaaacttcaggatagtgacactatcgcctccggataatgacactatcccatcgtgatagtgtcactatgacgaccggatagtgtcaccatcctgactgaagaaaaaactaatattttttttcattataaaagtactcaaaatgagacactaagcttttttcttgctttttattgaaaaaaagtttcatcaaaacatttgcagatttacaaaaaacaactacctttgcacccgcaatcgagagagatgcagattaacaaaatgaaattctggttcggtagttcagttggttagaatacatgcctgtcacgcatggggtcgcgggttcgagtcccgtccggaccgcttcttttaagtaagaagcaaagagaaataaaatgaattagtctattaatatttggtgcgttagttcagttggttagaatacatgcctgtcacgcatggggtcacgggttcgagtcccgtacgcaccgcttcttaagaaagtaaaaaagtctttgattacattgataatcaaagacttttttttatgcattacacgaaacccagatcgctaacagctacagtctacgactaagactggcggatatcttaaacatgctgttacccgccatcggacatcagacctataaagtcatatataaaaaagataataattcactgcatcatctgggttattcaattttaaatagcacctttgcatacataaagaaaatagaatgatatatgaaagaagtaatttttgtattattaaatgagttcgccgactgggaaggcgcatttatagctgcctgcctgaatcagggtgttatgcccggaagtcctgttccttataaagtgaaaaccttgtctataaccaaagagcctgtctcttcaatagggggattcagagtattgcctgattatgatttgaaagatatgccggaagattatgcaggtctgatattaattggcggcatgagctggttttcaccagaagctgaattaatagccccgctgatagaaaaagctatcaaagataagaaagtggttggcggaatatgcaatgcttccgttttccttgctatgcatggatttctcaataacgtaaagcatacgagtaatacaatcgattatctgaaacaacatgtcggagagagatatacaggtgattcgaactacgttgatcagcaagctgtaagagatggaaagatcataaccgctaacggaaccggacaactggaattttgcagggaaatactatatgcattagaagctgatacagccgaagcaatagaaaaaagttatctgttttataaaaacggattctgtccggagtaataaaagcaaggttaagtttaacaattaccggataactaacattagatataaaaatagcctcatacccaaatagacaaaacatacggagaacatcgggataataaagttccatttttcgctacgttccaatattccgaatcgtcagaagagattaatctttcctgacgattcttttctaaacatcttccgcctacatattctctctattataaattaatcagaaagttaaccatttcagggtcataatgggagaagaacagactttctcttttatcgagtccggcaatctcttccatatcctttgcagacaaggtgaagtcaaatacatcgaagttttctatcatgcgttccttgcgagtcgatttcgggataacgatgatatcacgctgaataagaaagcgcagagctacctgtgcaaccgattttccataccgttctccgattgctttcattacttcattagagaagaaattattgcgtccttccgcaaatggtccccatgacatgaccttcgtaccgtatttcttcataatctcctgcggtttcacttgctggttgaagacgtgtgtttcaacttgattcaccgccggtttaatctcacaaaattccgccaggtcgataaaacgatccggatagaaattgctgacgccaatggcacgagcttttccgtccttgtaagcctcttccatggcacggtatgtaccatagtaatcattgaaaggctgatgaataagcagcaaatcaacataatcactttggagcttacgcaaggattcgtcaatagaaacttttgctttttcgtatccaccgttcgaaatccatactttcgtggtgataaacagttcttcacgtggtaccccgcatttcctgactgcattccccactccttcttcattataatatgcctgtgctgtatcaatagaacgataaccgacactaatagcatccagcacacagcgctcacactcttcaggagtcacctgatatacaccatagcctaaaatcggcatttcaacaccgttgttcaatcttattgtttccataaatgtacttttaattattatattcaatacctatatacctatcaataacaagatcgatagtcgaattgatcttattgcagtacaaaattaaggaagaaacatacatctgacagtagataaattacgggttgttcaaccattattactgattctattcaacagtgaaactttccgacttaaagttactgtaaaaccttccggaaatcgctgtaaattttaaaacacaataatcggggtctgtcactccttcgggataatacatcgtatccccttcctgccatatcatctccttactggcaggatcggtcagcacttccatagtaccgcgcagcatcacccctctaaagaaccgcgtatcacaaaagtaaatacaggcatgattgttctcacgatattgggccacacgcattgacgaagtatttgtagtcagataaatcgtctttatcccttccctctttcggggttgtaacatagctttcatattaggaaatccttcactgtctatggaaccgataaaggccgttttcagcttatcaatcatgttccctactgttttttccgcatctctcatcgttcaataattttaattggttattatctgatgcgaaagtagggatatagaagacaatcagtgcaacagaaagaaagggagaaatatcactttttacggtttatgcgttcttcgataaagtaatggcgttgttccagtatattgccggaagctacggataaaataagagacagttgagaaatgaagttcaaacgcaatatccgatatagggaaatctgtataagtaagcagtctcttagcctcatccattactttattccggatatattgcttcgcactaatcccttttgtagaggttacaatctcattcagataattcggggtaatacaaagtttatccgcataatattgaacagaatgctgctctttcagatggctctcgaccaacttcataaatttgtcaatatggatattaccaacctctttggatgtagtttcttcttccatattcactttcttatattcccggtccaacaacatcaagacttcataaagtaatgcccttaatacatacacatcattctgtttgtatgtatcaatctccgttttaatattgtgcaatatctgaaggatacgcatataaagttcatccggcaactgtaatttggatgatgtctttcccgactggaagaatgaaagatgctgcacaaagagagaatccttaaaaagagaagataaaaactcatcttcaaagatcaaagcataaccattgactatgtggcgggtatcccagttccgaatctctcccggtttagagaaaaacacatcacgggaagccgcctcgttagtctgattatctatcgaaaacttgccctccccttctgtgacaaacgtgatatcatagtaagtcagcgtgtggacagaactctgagagaggaacttctttacgtatttcagttcgacgacatctatcaaaagttcacttccatacttattcttatagaaagtatatcggggaatcagatttttcatttcaattacaaaaataatattccttatcaaataatccaaagactttccggttttgagaagcaccggggtaagaatagactattcaacaaggaatatcttcaaatatagagaatgagacatttcttatttacagcttccggccagatatcccagacttgtcacatcggcccctaaataataagtaatgtacttcaaagggactctgtacagaatatcgggaatttctgataataaagaaaggtatctttccctgatcgtcagtttacgtgcattcacactcatttcctctttaaggtaaaactgatattccatcatctgacgaatcagattggaaaacgtgatggacgttgcacacaattcctcgatctcatcttcgctgatgtaataggccacacaccttgtcagtgttttgacagaatgcttacttgtattatagcacaatatagcgtcaccttcggacaggaatctgacggttttttcctctccctgccgggtagtaaatgtatgcaggataccggaaacgataatgtacaagctctgctcgggcattgtagcagaagcaatcgtttctcctttatccagatacactctttccatacgagccaacagctctttcacttccttttcttcaacctgatactcaaaacagagtttcttcaaataagcttccatacaaattgattttagttaatatatccacttaaaaacacctaattcgacatagcaggcatcatggtgcctttcaaataaactttcttccgggtatatcttaaataccaaatacagattaacaatgaaaccactgttgaaacaggcggtgcaaaacccatgataaacagggaagaactgtctatctgactaaaccagtacgacaacggaatccggaacaggaaagtcgctatcagactgtgaatcatcgggaataatgaatttccctgtccgctgaagtaagagtttatgcagaacacaaaacttacaacgatacagtcgatactatatccccgcagatactccgccgccattgataccaccgccgcatccttggtaaagaatgcggtaagcgtttccggcaggaattgtgaatacacacaaaccgatacaccgaaaacaagtgcaattcctatccccgaagccagacagcggttcatccgttgtataagtccggctccgtagttctgtgccgtcatcgtcgctactgccgatgagattgtcatcggaggcagcatggcaaacactataatcttctctacgacacccaaagaagccgatgcgatcactcccatctgattgactataacggtgatgatcagaaacgagatattgatcagcgcatcctgcaacgcaataggcgctcccaatgtcatgactttcttggccaggttccggttcagccggatatctttccgggtaaactcaaaatgaaatccgtgccgatataagaaccaaagagagatcacgaagctgactccctgtgccgttatggtggcaactgccgctcctgtggctcccaaatggaaatatcctaccaatataaaatcgagtacaatattaatcacacacgccagcgctacaaaataaagcggcgtcttggagtctcccaacccgcgcaaaataccgcatacgacgttatatcctactataaacaatatcccggccgaacatacaaggatgtaacttttcgtatccgccatcgcctctatcggcgtatgcatcaactctgctatccgaccatgaaaaaacaccatgaccaaagtaagcaacaccccgattattgaaaacaaccatacggacgaaccgatggtgaaagctactttcttgtcatcctttgctccggtagctatggcaatcagaacggttgttcctgtcgtaatgccaagaataatcccagtgattgtctgcatcacctgactgccgatggccacagccgccacacttgcagaatcatcgtattgtcctaccacaaaaaggtcggccccaccataaagtgcctgaagcacattggcaattagaaaaggaaccgcaaattgcagtaatactttcggaacactcccttgtgtcaaatttaactctttcatagtttttcaatacttactcctcttatcttacttgttacaaaataaaaaagtgccggacaagctgaatgattcacaccattcatcttatccagcactataattatctattatagcaccctccgatgaggattttctatgcctgtccctatttttggggtgcaaatatgggctttgttttcataactaccaaattataatcgataattatttttttatgataccataaggtatcaatgtgataccaatttcagaccgacaatggagcaaatcaatgtgaagatgaagaaaattctgccccagcttgccggctctttaaagaaaaagataccgatcagcaccgtaccggcggcaccgataccggtccatatagcataagccgtaccaacgggcaatgctttggtaacccttatcagaaggagcatactgacacacagggatatcagcagccctaatgaccacatatatttctctgctcctactactctgtttatttttcccaaacagaaagtaaagaccaattcaaggcatcctgccaaaatcaaaagaatccaattcataacacttcctttttttgattgcaaaggtcatgaatttccggcgcccttcattttacatttgtaaaaaagggattttacaaagtttaaaaaatcatcttatcttcgcacgaattctgcttagattgacctgtgagatgcctaaataggaagctataatacccaatggcacacgttgaagtatatcggaatattcggatatcagttcctgatacctctccaatgaagttttgaattgccttgatataaacagcttttccgatttgatgtattctctctcggcaaacttccgtccccagttggctatatgtatatcttccagatagagattgtgcagtttatcgacactgagttcatacaggacactatcttccaaaagttcaatattctcatatcctgcccgattatcataaagagtttgcaaagggaagattgcatccccttctttcccgaaccagaaggtaaccttcttatccgactgatgagtataggcatgcagcatccctttcttcatcagatagaacttagagcttttatggtttgcacggaacagatggaagcctttaggataggctacttcgggagcatcgctcagtaaagcctcttttgaagcatccggcaacttgtaaatcgagtctatgatatcatttatatccataagctgttttatttcaatcgttttgctacccttttcagcatagaacggatgatgactttatgaaaaggacgaataaagaagaagtacaaccagcccagtcggttattgaactttacaacggtcgtgattgtaaacgtctgcccaccggactccttctctccacaccataaggcagcatgaaacgtcaagtgtttatcgggcataccgaaaacaacttcctgtgcattctgctcacatatcgtatcggcaaagcgcataccaacttccagacctaacggtttgactatcgtattccttaacttcatcagcccattcacccacgccggagagtggttaaaagccatatcaaagaactcgtcggaagtgattgctttttcactgaccacattccttgaaaaagaatcgcaataatctgccggaagatagccggctatcaaactgtcctggggtatattctgctctttcatcatcttcagccataccttaatagtatggtttgccaaaagtagtcactttagatagacaaacaatgactttgcccgattttctgctattatctcctgcccgtccgacagatattactattacttattcacaaactgaaggtcataaatgaatatatacagcaagggctgccctttcacggagcagccctcaccattctatttacatctcttgtttttagtcttcaatcgtacatatacttacacggttccaatccggttcggtaaacatgtcacctacgccctgaccttcggcagtgatacgagaagcattgattttgtatttattgaccaagatagtctttacggcttccgcacgcgcagcagcaattcttgcattgacttcgacgctgccttccggagaagcataccccttgatcactacttttgcatcagcatatttcttcagataagaagctacgcgttccacattcggcaactgtgaagcgtcaaccgatgatttaccctgtctgaaagtaatgatagattcaggaacacgagcagttttcactacagtctccaccggaacgaccttggtacggcattcttccagttcttgctgcaatccgctgattctctgattagcactgttgagttcaccgtccttattgttcacctgtccgcggagggcattgatagaagcattcagatcgtcgatttctccctggttgtaaactcttactttagtgaagtaacggtttcctgtactactcttgaagtggtaagtcagtccggcagtcagttcaaatgctgcattattagcattgaaacggctttttgcctggttgaaatccccttgcatatcatatacgatggcaggtttcagtcccaatgtccaggccttgctttcgcctagattaaagttcagattcaatccgaaacgagtggaccatgagttttggtcgccatcaccattcacataataatgtagccagcccgctccagctacagcctctacctcaaacaaacgaggagtgccattataacctgcaaataagttcatcaagtttactttacccaacagactaatgtctgaagcatcaaaagccgttttacttgaagtagtattaatatatcccattccctgcaatcctaaaccaaaaataggagtcaattgttttgaaaccccaattccaaatccggggcgtgcattcttaaagaaagcgctgtgagtaagaggagtgattgcaccggcatttacctctacagaccaattatctgtaagttttgtaccttctacaacggattgagcatttgctgtaaatgcacccaataccatagctaataaaataatagatttcttcataatcatacgttttaaattgtaatgttccatttgctaaatcattagaaatgttttatctgctcatgcctaattttttagtttataatttattttgttattcactttaaacaacatactatatcaaatattagttcacgaccatctatctgaattaacaactatttgatatttaaaagtctcatagaacctatgatcaacaacagcatctccattcgaacaaataattaaatccattcgttaagacaataaaaacaagaaaaatgaataccttatctacaagtaaacaaaaactatccttagcctttaaaataataaaagatacggttcaaggatttgttgatgacaatgtaatgagactgagtgcatctttggcatacgctaccctattttctatcattccattattttctctattaattactattggagtctttcttcagattgatctaactgatcaattatatacccagatagaaccagtcgtaggtccaaaagttgtcgaggcgctccgatccatcatcgagaacgcgacagaagcagacgtatcttcttttgcaacaattattagcgttggagttactatatttagtgcaactactgtctttgcagaaattcagagttcactgaatactatttggggcataaaggcagtcccccggaaaagttggcttaaatatattaaaaaccgattactctctttttctgttatcctcgtatttgctttcattttattgatcacatttaccattactaaccttatcacagatttgagtaacagatatattgccaacaatccggatgtagccgaatcattagtaaaagttataggcatatttgttaacatagtagtaacaactatcatattcacactaatctttaaaatactacccgatgcaaagattaaaagtaaagacgtatttatcggagcactcgtaactactgtactattattggcaggtcagtggggaatatcgttctatatagctattgcaaacattgaaacagtttacggagctgcggcattcatggctattttcatcatatggatttactactctgccattatcatatatacaggtgcagaatttaccaaggcttgggcaaatgagctgggaggaaagattttccctgacgaatatgcggtggcaactaaaataatagagatacacgaagaaaagcaatcgcttacatagggtgggtagtgtcactaagttccggcaaccgaatacagccggacttagtgacaaacgattaatcagctacttacctccgggcatcggcagaaagtgtatagatttcactttttacatcattttctcttctatgctgtttagcacgcaccattttccgtaatttctttgttttagattctggcgagagatgataaataagcgctcctattgctgaacctagtgtcagcctgatccataaattaaaactaccggttttcataattaattgtgttaacggttaaacatataaaataatgtcgtttccactctctctgattgtttatgacaaaaaggggagaacagctatcatttacaccgtcctcccacttttgaacaacaaacacctagctatttttttgctttatccgagaaagtatgaactttgtttcttacatcatctgctttttctgctatatgaaaggttccgtccgctaccttatcggccatttcaaccccagcatccaatactttatcattcaccgtatcaatcatgtttatgccttcaccagttactttctgaaaggcatgatttactttttctttcatcttcttgcccttaggagaacaccaaaaatgataaacaagcgctccaactaccgagcctactcccagcccaataattaaattagattttcctctttccataatcaagttttagtttaaattattaataaatcaaagttcttcacccttcgttcggatgccttctgaataaagatacaatccataaaagcaatactgcacctacaaccgaagtaataagactacccaaaatgccaccagtagcaatacccagcagtccgaatacccagcctcccaagagaccaccaatgatacctacaagaaggttaatcaggagaccgaaacctcctcctctcataatcttcccggctataaaaccggaaacgattccaataataatgtaccaaattacactcataatgtttaaaatttaggtttatatttacatttcaaaaaaggttcatatttttctcaaaccaaaactgcattttctatttagtttataaaccaaagaacaagctatccaaacatctcgctaatttagatcctgtttttcattcaactattaataatgtcattcattaaaaaataaacaccattcagtatcatttagttctattttagcacttgcgtttaacacatatttcgttttatatcacactttcataactttcagaatatgatccaactaaattattacgattttaagaatgattatattcttctgacaaacttctattataagcaagatgttttactaaatataagacttttaaaatatataaatatggaaaataatgacaatctatttcttcttaatcatcctgactatgatgatatacacagaatgtgttcggatgcatatactaaagggcgtatggtagaaaggtcactcgctattgaagcatacagattacgttgtagtaatctgtttggcaacagatgtatgagtcggacaatcttcggagccctttccaaaaaaacatgtgatgggaattgctggtatttaaaccaattcaagttggagctatacaaactggaaacctaaataaaaagagttctctctgtatcttttttcacattctcgatacggatgttaaccttgtcttgagtatttttatccccgcaagatgtcattaccaaggtaatagcacatgccatcacccatgctataaataataattatcttatatattcccgattaaattgttatatttaggtaagaacttaaattcccggtaaaagatatcttcgaattcttcgaccgggaataatataaaagattcatttaagaaatggtaatcttatttcttatccgactttttaccaaaagatgtagatttctggtagtcacaccatgtcaaatccttatcaggagttgccgacagaacctggctgctacgttctttcgctagcttttggtccattgcacgtacttgcttttcggtacgctcggtaccttccggctttctgtccaccaatccattcgtatttcttacttcttgcaatggatcatcaatatattgccattcttctttcagtctcgtgctctcaccttcgttccaaggaccacgggaatctccaccctttgacaagttaaaataaagattactatatttaggtgaagtttgtaaagtaccgggagggaagttgggctggatagttgacaatgcagcttcaaactgttgaaaatgagtaatctcacgagtcataaggaatgtaagggtttctttgacaaatggatcctctgtaaacgaaagcagattttcatatcctattttggcacgacactcattagccatattagactgaaggtccaccgtcaattccgcattggcagatacatatgtagcacaccaaggattcccgttactatctgtcagcataggactgccgggagcaacaactacacattggggattggtaaatgcctgatggatatattcctcttttgcagatttaccttccattaatttgctaatctccatcgtttcaacagcatccttcattttaccgtttaccggaccgagaagcatttgtatggtagctcctactatttcgagatgcgtcaattcttccgtagcgatatccataagcatatcatacttatcaggaaacggattatgacaactaaaagcctgtacaaaatactgcatggctgaggttaattcaccgttagcaccgccgaatgcttcgagcaatatacgggcaaaacgcggatccggtttggatacgcgggcattgaattgcaaatcttttacatgataaaacataattgattcattttaaagttaataattcaggttggttgagatgtacatctatattttaataggccggacagcaccaaaaagctgtccggcacacatcaagaatcaaaatttataaccataacccaacatgatgacgacattatcatcgttggcaaacatgaatttcgcctctgcatttaaataactacgttctgataaaggtaacgtaataccgcctccgagattgaaagcaaactttgtagtattgcttctatctaattcggtagtcacaccgtcaacttccactttctgttttccatagaaattattctgcatgcctattcccgcaagcggatagacagagaatccttgcccgtcttta

SEQ ID NO: 4631 - DNA, 13135 bp, Unknown
  gut microbiota DNA sequence
tcccgtcactttatctttcggaaagaaaaatgtgagatcaggcgcaatccgaagattgtcagctatcacataacgtccctgtgcctgcaaaccgaacctttcataattggtttgatatccaagacttcccatcaacgaaccttctcccttttttgtctgggcattcattcctaaagctgcaagtgcaaccattactgataataataactttttcataattcaggtattaagttaataatctatttaattaaaaagagaacttctaagtcattaatcttcgatagtacagatacttacacgattccaatccggttcagtgaacatatcgcctactccttggccttcggccgttatgcggtctatattaatcttatatttcttgactaaaatattcttcacagcctcggcacgcgcttttgctattctatcatttacttctatactaccttctggagaagcatatcctttgataacgactcttgtatcaggatgtttcttcatataagaagctacacgttccacattcggaagttgcgaagcatctaccaccgagcggccttgtctaaaggtaatgatagattccggaaccctgcttgtctttaccacagcagcgggaacagtctttgtgcggcaatcttccagatcacgctgcaatccactgattctttggacagcattattcagttcactgtttttattattcacttcaccgcgtagggcattgatagaagaattcagatcatcaatttctgcctgattataaactttcactttggtgaagtaatggtttccgttacttgttttgaaatgataagtcagcccggctgttatttcaaaagccgcactattaacattgaaacggctttttgctctattaaaatcaccttgcatatcgtacacgatagctggttgaagtccaagggtccaggccttactttctccaaggttaaaattaaaattcattccaaaacgggtggaccaggagttctgatctccatcgccgcttgcataataatgtaaccaacccattccggccacagcttctatttcaaagacacgcggagtaccccaatagcttccaaacaaattcatcagattgacctttcccaataaacttacatcagaaacatcaaaagctgtcttactccgggtagtattaacataccccataccttgaaatcccaaaccgaaattaggtgttaactgtttagagaaccctactccaaaagcagggcgcatactcttgaaaaaagcactgtgagtgagaggtgtaatcgcaccagcattgattcctacagaccagttatctgtaaatttagtactttctaccaccgattgagcatttgcagtaaatatacctaatgcacaagctaataaaataatagttcttttcataattaaaaatatttatgtgaagttttgtttgctattcactcaaaaaaaacatatcctataaaaaaatagttcgtagttttagttttgcattaacatctattttacagtcttaaaatctaaaaaacagcacatatatgaaataacgaccatctaacttgtttcttatgcaaaatatgcaagaaagcctaatgatagatacagaaaacggcaggatttttattttagaagtattcaaagaatagttatattaagctttatccttcaataggaaacaattttagttcaaattcatttagaatggttacaaaaaggaatataatctattcaaattaacagttcctttcctttcataaaataaagtaaaccagggaatctatacagacaaaatagaaattcattcactccttttaaaggtttagtagcttcctcaccgaccaacattccgtttcttttaaaggaacgaagtgttcctttaaaagaaacagacacaaacactgctagttattatgcataaataatcaatttctttgcactagcagagctttaaactagatatttattcataattttatgcagtactctctctatctgactttaaaagatatctgattcgcccaataaaaatcttaaaaacagaacatagttaatatatataaatccccccatccaacagttcggtcagtatatatatcacgcatgtatttccttattttaaattcatttatcttccggaatcacttcattcaaacaagctatggcattgagagtgcgcggatagccgatgtaaggcaagagctgcgtcacgacagccagcaaggtatctttactattacctacattgacatttccctgtatgtgccctttcacctgtgattcacagcctcccaaggaaacaaggatggagaacgtcagcagttcccgtgtcttcacgtccagtccaccgcgtgtctggtagtctccgaagcagttggcggagagataacgctggatatgcttttggttttcgggagcgtttttatgcatttggtctatccgttcgccgaaaatggatttctgcaacgccagtcctttgtcgaaacgggtttcggcagaaacgaccgcttgtccctctaaaggcagacgtacaccgtgggcaagcagcacctcattagtgatgccgacaaagtccatcactttagccatgcctgcataggctactgcctggtaaaggatttcctttatttctatcggagtaatacctgcattgagagcgctttcaagcatcatccggtattcggtctgtgcctgtgaagcaatattggatgccaatgttatcataaggcgggttttagtatccaggttgccgtattgctgcacctcctttgtgaaattgccgaatattgcatccagttcggggtcggtggcgcttaatccggttcctccgttacctttcgtagcttcggcatactgccggtcgtctacccgttccagccaaatattcttgttggtctgcggattacagccgatagccagatgcgaaaaccaactatcgggggcggcaccgtgccaatgttctatgtccggtgctatttcaaccacatcaccggggagcaggcggcgtgccgctttgccacgttcctgataatatcccacacctccgacagcaatgaggatttgtccgcccgtatggctgtgccagttatttcggaaaccgggttcaaaagtaacgttggacatgggtacattcaagtctttgttaccggtcagcggtgccagccaggattctcctgtaaaatattgcttgaatcccgtattttcctttcctaacggaaatgcgctgatgttctgaggtacttcttcttttttcatactctgtgcatttatagattgcatcgggatttgcagaaatccgatgactgttacaaaaataaaatataattctctcatactgtgacgtctatggtttactatttaagaactcgccgataatgcaaaattagctgttctgatccaactctttataatacaagttacggatataaaaaccaaaattacggatttatagtactgcctgtcatttacttcatcttcagtccgggaatgagtggcgtagcatcaatcatgattgtcgttcgaatttcactgccacattgcccggaacgttcaatgcatctattccatcaccgtcaatacggccaatctttatcaagtcattgctttgcgacccgcttttacagaagatcgccacattattccacggcacatagattgtaatatcaccgggcacaggcgcacagccacgggtcactcctgccgtagtcagtgcaggcgacggatagaaaattttctctgtgatattattataatcattcagcgtcacttcaagcggcagacgcgaaagaaagtcttgcgctgcggcattgtcttccatcgtagcagtaatggtacggttaccgactgtaatcttcacatgcatagaagtggacggatgattgttttctcgactcgcaccgagtgtttcgagccatgtccgtatccggtttcccatctgcgaaagtgtcgaagaagtcagaagcaatgtttcggtgaaagtggcaccggagcaaagtgtccgcgcctcgtcaactgatgcagagatgccgctgctgccactgctggcaaaaagagcgatacgcttacctgcaagtttcgaggcatgattatgcaggaatgtctgcatcggtgtgcccatgctaccgtaccaaatcggatagccgacaaacacgatatcatagttgccgaaatcttcaaccgaagttttaatcgccggataattcccctgacggatagcagccagttcttcctgtgcacggttgagcatcccattataatcgctttcataaggtgtttgcggttccacttccaggatatcgcaatcgagtgtttgctgaatctgttgcgccatacgctccgtgctgccggtgcgcgaacagtaaagtaccagatatcgcccgttaccgcccggaatggggtttgtcgggtctgtagaatcatcctcgtctccaccatcggaatttcccggttgtcccggctgttccggaagaatcggatcagcgtttgagccgtcgcaagccgccatcggcatcatcgtcagcatcatcaatggaattaatagaatctttttcatattactatctcttttcaatgttaaattaccggttacaaagttacggggaatggaccagcccggatgtagacgatttacggatatttataccccaatcatggattttgatgggagagtaaaaattttaaagagaaaagaattatatttgtaacgcattaaaaaacagattgtgatatggaagagaatactaaagaaatgattgtaatagacaacgttgaccgttacaacaaaatcttcgggcttgaaaccagacatccgttagtcagcatcatcgatctggccaaatccactacgtggcccacacgtgcgtggtttcgttacgaagtgtatgcactatacttgaaaaatgtaaaatgtggtgatattaaatacggacgccaatattacgactaccaagacggaaccatcgtctgttttgctcccggacaaatcaccgacctggaaatgctgccaaatatccagcccaacgcgcatggtattctttttcatcccgaccttatacgtggcactgcgctcggacaagaaataaagaaatactccttcttctcctacgaaaccaacgaagcactccacatttccgaagaagaacggcaaactgtgatggactgcctgcaaaaaatcaccatcgaactggaacattccatcgacaagcacagccgccgactgatctgcgccaacataggattactgctcgactattgtatgcgcttttacgaacgccagttcgacacacgaaacggagtaaacaaagacatcattgtccgcttcgaacatctgctcaacgaatatttcgaaggagatgccccgcaaaatcaagggttgccatcggtcaagtacttcgctgataaagtattcctttccattaactacttcagtgacatggtacgtaaacagaccggtaaaaccgtctctgaatatattcaggataaaatgatcggattagtgaaggagcagctgttgtctacggacaagactaccagccagattgcttacgaaatcggattccaatatccgcagcaccttagccggatgttcaaacgggttgtcgggatgactcccaataaatttcgtctgcaatcctgaaacgctatcttggttaggtgaatgaggtaataggcgatgataacgcccgcctcattctgttcagtccttctatcagccgttgccgcggacaagcgatattgatgcggacaaatccttcaccagcttctccatacagattgccttcattcacccaaagtttttccttctccagcagagttttcactatattctccgacgattgtttcaaagccgagcaatctacccataccaagtaggtgccttctaatggcatcaccggaaattcgggaagatatttatcaaagtaagcccttaaacaatggtagttggcaaacaggtattggttaagttcttccagccattccgcaccgtcattgtaggcagctatcaaggcttctacaccaaacgggtttacatcacagacttcatttatattgattgctttgtttattttcatacggatatcagcgtcggcagaaacaatattggcaatctgaagccccgccagattaaaggctttactaggcgaggtgcaagtaacggaatgcatcagaaactcttctgagacagatgcaaaagggatataagtatgtcccggaaagacaagttcgcaatgaatctcgtctgctactacccatacattattccgaaggcagatttcccccaagcgagtcagttcctgctttgtccagactcttccggcaggattgtgcggattacacaatagcagaacttttacactcgggtcagccgccttccgttccaaatcgatgaagtccatctgataagttccgtccatgtaaatcaatggattggcggcaacctcgcatccgttattgcggatggaggagaaaaagcagttatagacaggtgtctgcacgattactttatctccgggagttgtcagcgccttgatgacagctgacagggccggtactactccagtcgtataaataatccattctttttcaatctgccagccatgacgtccggcaaaccatcctgttatcgcctcatagtaagcatcgggcacacgcacatatccgaagataccatgttccacccgccttttcaacgcttccaccacagagggagctgtacggaaatccatatcagctacccacattggtaatacatccgcatctccggcagaatcccatttataggaatttgtacctctgcgcggaacaatttcatcgaagttgtacttcatatatttcaatcaaaacaagtcagtccgtcccaaagtttcaattcgcagtttcccggagctttgaggttctcgtccaagatgattgtcccgaaactttcggcaacaatgtttcccgtacggggattcttcacgctgtgaaccgggcctttaatcgttgccttcacactactgtgttcgaaagcaagatcggcatcatccgccatcgtgcaattttccattatcaggtcgtgtgcgtagcaaagcggttgtgtacccgaaattttgcagttcaccaaacgtaagtttttagaatgccatcccagatattctccatccagcacagaatcgtagactgtcacattctccgtattccaaaatgcatccttcgaatggatttcagcatgacggatttctacgttcttgcaatattggaaggagtaattgccattcaatacaaaattcttgatgcggatatcttctccgtgtataaagagatagtctcctttatctatcttcacattgttcagttccacattccggcaataccagagtgtttccaaagcattgggcaactgtacattttcgagttcgactccgtccatttcgcgaaacatcttcggtgcttccactaatgtatccttcatcttcagatttctggagtaccagagtgcggcacgtgctccttcggtaaaaaggcaatttttaactacaaaaccatcattgtgccaaaacggatattttccctcgaaacgacagtttaccgcttctatatcactgcactctttcaatgccgattcgccagcatgaatggttacttcttccagataaagcccgtgggatgcgaacaaaggacgttcgccttggtaatgtgtatttttaatttgtttcatgattcgattgtcttttatttaaatagttatctgtttttcctgttcatgcttattttttcagatattccttaaaaaaggattccaatttatcgaatggtataagacctacacggtcgtaaaggtctacatgacctgcaccgggtacaatgtacagttctttgggctcagcagccagtcggtaggcatcttcactaaattcgcgtgagtgggcattttctccggttatgaaaagcataggacggggcgaaatagtctcaatatctgcgaaaggatagaaattcatgaatttcacattgctcgaaagcgtaggatgtgtggtagtcatcggggttgctccttcgggagtaaactctcccctctgagtgcggtagaactcataaaattcgcgttctatcggaccggagttttctgtcacttcgtgtacagtgccaccggtatatttagtttctccgcccaaaaactctgcatagcgctgttctgctgcctcagccatgatttgtttccgttgttccagagtcagcgcatgtttcagtccgttacgactggctgtacccatattgtacatgctgatggttgcaatcgctttcagacgaggttctatcttggccgcactgatagcgaaacttccgctgccacaaattccgattacaccaatattattccggtcaacgaacggacgtgtacccagaaaatctactgcggcactgaaatcctccgcatatacctccggcaaaacagcattgcgcggctcaccttcacttgcaccccaaaaagacaagtcgatggacagcgttacaaaaccacgctccgccattttggtagcgtacaggttcgcactctgttccttgaccgctcccatcggatgtccgacaataatggcaggatatttctctccctctttcatggtcttcggcaaaaacaggttgccggctactttcattttatactggttagaaaaagaaaccttttctacctttacccaatcacttttataaaaattatccgcatcagcctgtgcgaaagaaaaactggttccaagcatcataataaatacaacggttaataataatattcgtttcatatctcttacatttaattattaatgaattgattgtctactttctacattgcaaaaatacggtgaaataaagagagtgtttgtagatgaattactgacattattaccccaattacggattatcggttttatctttttgccgcacataagagtatatactattatatataatgattacgcgtgcgtgataccttatccaaagtatattcaggagaaaagaatcaagcttgcaaaagagcacatggttgatatagaggaagtcatattttatgttttatcaagcccatttttagcggaactgtaatataggtaaaagaatccgtaattcatatacaaacagatttcaaatccggcagtatctttgcagtgaaataaaaatataggtataaacataaaaaaacaatttgatatgtatttagaaaatatttactctcccgcagacgtaaagaagttatcgtttcaggaactgaatgatttaagtcacgaaatccgtgcatccctcttacaaaaactgagtgaacatggcgggcacttcggccctaacttcggaatggtagaagcgaccattgccctgcactatgttttcaattcaccgaaagataaaattgtatatgatgtatcacatcagagttacgtacataagatgctgaccggacgtaaagatgcttttctccatcctgctgaatatgaccatgtatccggctactcagaaccacaggaaagtgaacatgatttctttgtgatcggtcatacttctacttcgatcagcttggcaagcggactggcaaaaggacgtgacctgacaggtggcaacgaaaatatcatcgctgtaataggcgacggttcactaagcggaggcgaagccttcgagggactggactacgtagcagaactcggaactaacatgattattattgtcaatgacaaccagatgtccattgccgaaaatcacggaggtttatacaagaatctgaaagatttgcgcgacagtaacggtcaatgtgaatgcaacttcttcaaagcgatggggctggactatatgtacgtgaatgacggcaaccatgtggaagcactgatcgaggctttctccaaagttaaagatatacagcatccgatagtagtccacatcaatacattaaaaggcaaaggttacgagcctgcagaacaggacaaggagacctatcactggcgtactccgtttgatctagaaaccggagaatcaaaaatgaacgacgacgcagaagattatagtgaagtaaccgctcaatatctgctgaaaaagatgaaagaagacaagcgtgtagttactattacttcgggcacccccgctgttctaggcttcactcccgaccgtcgtcaggaagcaggcaagcagtttgtagatgtcggtattgccgaagagcatgcagtggcacttgcttccggtatcgcagccaatggcggaaaaccggtttacggagtgtacagcacctttatacaacgctcttacgaccagctatcgcaagatctctgcatcaataataatccggcagttctgttggtattctgggggacgttatccggtatgaatgatgtaacccacctctgtttcttcgatattccacttatcagcaatatccccaatatggtctatctggcacctacctgtaaagaggaatatctagccatgctggaatggagcatccgccaaaatgagcatccggtggctatccgtgtacctgccacagatgtaatcagttgcggtgaaccggtggaatccgactatagcaatctcaatcgttataaagtcgcccaccgcggctccaaagtagcaattcttgcattaggctccttcttcggattagggcaatcggttctgtcattgctgaaagataaagccaacattgatgccacccttatcaatccccgctacatcacaggtgtagacagcgaactgatggacgaactgaaagccgaccacgaattagtgattacactggaagacggagttctggatggtggtttcggtgaaaagattgcccgttactatggcgctacagatataaaagtgctcaactatggagctaaaaaagaatttgtagaccgttatgatatacaggaactgcttcgtgccaaccatctgacggatgaacagatcgtagaagatatcctatcactcattggctgataagtcaaaaccagttcattatatatttcatgtaggttgatgtatccgttcgttatgggatcacatcaacctgcattcattttcacttaaatccataatcccttccgataattgagaggagtctgccccatatttctcttgaaaaacttacagaaaccggcagcatcgctaaagcccaactgagaagcaatatcccctaccgtagatttagtggaactcagcaaggttcgggcttccatgatcaataactcattaataatcgtattcacactttttcccgttccggcacgaacgatacgcgcaaggtactgctcactgatggccagcttatccgcatagaaactaacgaaatgctcttctctgaagtttcgggtaacaagcgcatgaaattcctgtaaaacatggtctttacgactgacctccttttttatgatggtctttcgggaaagaaaatcggctatatccaaaaataaggcattgcaagccgcctgtattcgccggaaaagaaactgatgttttatattcagcaaacgcatcaacacttccagttcattacgaatgatttgagcttcgtatgctgtcagctgtatggtatattgcttattctgcctcatcgttgccaacagaatagccgttatctgggtaagataagagtcatctgtccgcatggactcggaaatggagagggtgataaacttaatatccggactcgaataaagatggtcggtgagataattcgctccatgaacaagcaacatatcaggctctatcacaataaattccccattcaacaaaatctcggaacggccttcaagaacgagtatcatataaagttcacgattaaagtaacgttcgttttccggatagctcctgtccttatattcactcataaagcagactacctcctctttataatgaggaatttccggatgttcctttaataactgcctattatcaaaaatacgagattttaccatttacacctccttcttttcgacgtaaaagtacaatttgtttcggatatgacaaaaactgtgtggaatcggataacttatatcagacaaaaaaacgggacctttgcatattcttctttatagaatgaagaacaatacgattatataagatagataagatatgggaatgaaagacgtttttaaaaggtatttggtatttgttatcggattgtattttctggctgccggaatagtgttgattgtacgttccgcattaggaaccacacctatatccagcatcaattatgtgttaagcctgaacagccctttatcattaggaacttgtacgtttctgatcaatatgctgcttattctgggacagttctggatcatcagaaaaaataagacccgacaggacaccattgaaatactccttcaattgccgttctcttttatcttttcagcattcattgattttaatatggcactcaccagtaatctgcatcccgacaattacgggatatcaatagccttattactcacaggatgcatgatacaatccataggagtcgtactcgaactcaaacccaaagtagcaatgatgagtgcagaggctttcgtaaaatacgcctcccgccgttataacaaagagttcggaaagttcaaagtctgttttgatgttacgctggtcactctggcagtcatactctctctcctgctttcgcaatgcatcgaaggtgttcgcgaggggtctcttatcgccgcctgcatcaccggatatatcgtcagcttcctgaatcagaaaataatgacaaggaagactctctacaaattattacctgtattgaaataagttttctccagctcactaccagcaacgtttccatctgcctgactatatagtaatgcttaaaaataagttggtacttcgagggatgtttggatacatcacagtgagtacattagatgtagtgcgctatatctgtttaaagccatctgttgtttgtatgttaagtcactgtatcccatacgttatcctatatacatcattgtgttatctcaccgacatcttcatcgttccacccgggtagactgatcattgcactggagtgaactgaactgttcacccgggtaataagtactgttcacccgagtggaacaatgaagatgccggtgaaatacagggaaaacgcattatactttttcttttatcttttatacatttatcttacatgaatatcgtcttttcatct

SEQ ID NO: 4632 - DNA, 4129 bp, Unknown
  gut microbiota DNA sequence
ccttcttcctgaacaaccaaagcatcctgtagattcttttgtttattcagttcctcctgctcttcctgctgctttttcatccaaagagtttcctgcgttttcaatgaacggaccacattcaattgcgcattcagttctgccagcaatttaatccctgccgcacgtttctcaactaactgttctttctcattctgcaaggttaaaagttcttcctccggcaacaactcaatcacactcatcttactttgaatcatcgtcacctcttcttgtgcagccttattccgggcaaaaatctcctgagagatgcgggaataaactcctgttcccgtcaatttctccagtagttccgctttcgctgcccctctggatttcaaaaaagttgcaaagtcgttttgtgccagcaatacggtacgggtaaattgctcatacgtcaaaccgaccaactccactaactgtgccagcagttctttcttcgttccctgaaattctttttccgtatccaggtctttcacctccaacacttgaggctgtaaagaaccgctcgccttattccttgtccgtctgaccgaccaccgggaacggtatcgatgtccgttcactccttgaaaatcgacctccgcatatccgtcactcgtcccccgacgaagcagatttctcacatctgactgattgatctggttatctcccacatctgccagattgatactctccaccgaagccgcaaaacggggagccttatcatataatgccagacacagagcatccaacaaagtcgactttcccgctcctgtagcaccggaaattgcaaatataccagccgaagataacggttccaccgtaaaatctatttcaacactgccttctatcgaagtcagattcttcaatcttattgctataattttcattctccttcctcctcttctttacgagttgcggaaatatatgcttcctgaaataaatcagtcaagtctacaggcatttccgtctgataaaccttttcgaatgcagattgagcaatctgcaacggagacatttcctgcaatccctttttccagccatcagcctccttttccactctttcttcctgacgataagcagaaacgatacgtgccagacgatatttcttaccagccaatgcctcttctatttcctgacgaagcataggttccggttcttcaagcaaaaccttgacttccagataaggagcttctccatccacctccggtaagtctcttattatttctattattttttccggtgaagcagcctctccacccggcacactgataagaggtatggattgtggacactctatccttctgatatcaaccgcacagccttcatctaaagtcaccatcaccactccgtgatgataatgcttctcggcaaaagacataggaatcggacttccggcatatcttacattctccctgccggatacccgctgtgctttatggatatgtcccaaagccgtatacgctatcttttccgaaaaagtatcgggtgatacacattccaaaccaccaatcactgtccgttcgctataatccttctcggcaatctctgatccggtagcctgtaaatgaccgacagcaagaatagcctgattcgtttcccggcgtgcccacaatctttgcaaaagtcgcgcataaagttctcgaactccttccatatatggatttccttctgtctccactaccggataatctccctgccgcaaaaaaggaacagccatacaaagtacttctgcttccccttctctattcttcaattctattgtcaaatgatcatagtcaatctctccgccctccaatttgcgcactacccctctgacttccgtccgcatcgcctgcaacaaaggcagaggagcttccaaacgcgccgcagagtcatgattaccggcaacaatcacaatttgcagtttcggattctccgcagtcacccgataaataaactcataatatatgcgctgagacgcagcagaaggattggaaacatcaaacacgtctccggctataaccaatgcatcaatctcgttttgtcggatttcttcggccagccaatcaagaaaagccttatgttcttccgcgcggtcgtaaccaaaaaatgtctgtcctaaatgccaatcggcagtatgtagtatacgtatcatatcattatctgtctataacagaagacaaaaataacataatcgcaaagattatgttgtatcctactgctttttttaccaataatcatgtatctttgcatatatataaaaataaactccccatgaagatactatattatatttatcaaatttgtattgctttacctatcctattggtattgactattcttacagcgattgtcaccattgtaggctctttactaggaggagctcatttctggggatactatccgggcaaaatatggtcacaactcatctgtctttttctgttgattcctgtaaagattcacggtcgtgaaaaattacacgggaagacctcttatatctttgtgccgaatcatcagggatccttcgatatttttcttatttatggattcatcggaagaaatttcaagtggatgatgaaaaaaagcctgcgtaagataccatttgtaggaaaagcatgtgaaagtgcaggacacatttttgtagaccggtccggtcccaaaaaagtactggagaccattcggcaagcaaaagattcgctgaaagacggggtatccttagtcgtttttcccgaaggagcacgtactttcaccggacacatgggatatttcaaaaaaggggcgtttcaattggcagatgacttgcagctggcagttgttcccgttacaatcgacggttcttttgaaatcctgccacgtacaggcaaatggatacatcgccatcgcatgattctgaccattcatgaccctattcctcctaaaggaaaaggtatggaaaacataaaagctactatggcagaggcttatgctgctgttgagagtgcacttcctgaaaagcataaaggaatgatcacaaacgaagaccaggatcggtaagaaacgaaatgcggggatactcacgcacccccgcatacctaaccagtctttatgcattaatctattaaatcaaaaagtctatatattatgtagaaatcttattgtctggttagacatcatttgcaattcctggaatgtcaaagcaaatcctcttcttatttcttcttctaatcgctctaaagagaagtactctgcttttattccattgattttgcctctaaaataattattgtattgttcatgcaatgtatctggagtaactaaacctccaaaaccatattcccccactacaataaccggttttcgttgtaataccccttcataggctataccccttgcgccaatgataagcccagcctcatttacagcttcacttatctcctcgtcagaaaagatatatctcacctgatactcttgtattgtatctaatagaatacttactctcaattttgcacggggacaatcaatcccgactgcaatagaagaattatattcaatagattgctgtttgtcaccttcccaagtgccaatagcaactgtatgatgactattcattatataaaagttaaggtctagttccttatttactctattactagttctccgtatacgtatccgcctccggcgactttaaattctagtttataaacgcccggagcccatccttctatagagaaagaagttgtttgtccaggagccgttacctgacagacttcctgtacttgtccatccactagtattttcacttcgcccaaaggaactgtgaaaatgatttctacaatattatcatctgtagaaacagacgcactaataggtattacaggaatagaacgatgagtagtagttgggacttctccctttaacacaacaggcaattttctctctacccgatccgtactctcaatagcaatcatatttcctgcaataaataatgcagctaaaaaagataaaataaaacgtactttcataactatattgcttttttgtttcgccaaaagtacggtatgtattcgaaaaaacaaaaaaatcaacccggacaaattacgagagagaataatcaaataaccacctattaatcaaattattaagaagatatcat

SEQ ID NO: 4633 - DNA, 715 bp, Unknown
  gut microbiota DNA sequence
ttttaccaagttctcgtaggactagtcaacactctgaccaccgttcttgctcttgtgatcatcgacagggtcggccgcaagcaactggtctattacggagtttcggggatggttgtctccctcctgctgatcggcatttacttcctcttcggtgattcctggggagtatccagcctcttcctgctcgttttcttcctgttctatgtattctgctgtgccgtctccatctgtgccgtggtgttcgtgctcctttcggagatgtaccccaccaaggtgcgcggactggcgatgtccattgcaggattcgccctgtggataggaacgtacctgatcggacagttaaccccctggatgctccagaatctcacccccgccggaacattcttcctgttcgcagtcatgtgcgtgccgtatatgctcatcgtatggaaactcgtgccggagaccacaggaaagtcactggaagagattgaaagatactggacccggtcggaacagtagaagaaagaaagagaccttaataacagtaaactaacaacaactgagaagtatagagaagccgcaggcggttttctgcatggccattcaagaaacgtttcccgccttcggtgtaccctatacctatctataataaaaacaatattatggattttaagaaactagcgaatcagtaccgggatgaattgttggacaatgtccttccattctggctcga

SEQ ID NO: 4634 - DNA, 67102 bp, Unknown
  gut microbiota DNA sequence
acgatgggaacagtcaccgatatcgatggtaagtttaccataaacgatgtaccaagttctgctagaactttgaaaattagctacattggaatgaaaactcaggagattcctatcaaaacaggaacaataagaattctgatgaaaccagatgcagaagttctggaggaagtagtggtaaccggtatgcaaaaaatggacaagcgccttttcacgggagctgcaacaaaacttgatgcagaaggcgtaaaacttaatggtatggcagatatcagccgtggtcttgaaggccgtgctgcgggtgtgtcagtccagaatgtatccggtacatttggtacagctcccaaaatccgcgttcgcggtgctacctccatttatggtagctccaaaccattatgggtagtggatggagttattatggaagacgctgtagaagtcagcgctgatcaactatcttcaggcgatgctgaaactctaattagttcggctattgccggtctgaacgcagatgatattgaaagctttcagattttgaaagacggctcagcaacctcaatctatggcgcacgtgcaatggcaggtgtaatcgttgttactacaaagaaaggtaaagctggagtcagtagaataagctataccggtgaatttactacccgtttagtaccaagctacaatgactttaacatcatgaactcgcaagatcagatgggagtatacaaagaaatgcaacagaaaggctggttaaatttcgctgaaacctcccgaactgcagaaagtggtgtatacggaaagatgtatcagttaattaacacatacgatcctactaccggacaatatgcgttattaaatactgacgaagctaaaaatgcctatctacgtgaagctgaaatgagaaataccgattggtttgacacacttttctctcccagtctaagtcagaatcattctgtaagtcttagctctggtacagaaaagtcatcgttctatgcttctttaagtgctatgcacgatccgggatggtacaagcaaagtggagttgatcgctatacagccaacttaaatatgaatcataatatcttaaagaacctaagcataaacttgatatcaagtgcttcttatcgtaagcaaaaagcaccgggaactttaggacaagacattgacctagtaaacggtcaggtaaaacgtgaatttgacatcaacccctattcatatgcattgaatacttcacgtacattagacccaaacacttattacaccagcaactatgctgatttcaacattctgaacgaattggacaacaattacatggaactgaacattgcagatttaaagttccaaggcgagttgaaatggaaaccaattaccggattagagctaagcgctttgggagccgtgaagtatcaatcaacttcacaggagcacaacattaaagaccagtcaaaccaggcatcggcttatcgtgcaggtctagatgacaagacaattatggaccgcaatccatttctttataagaacccagataatccatatgcactaccgatctctatcttaccggaaggtggtatttatcaacgtagagactataagatgctaggttacgacttccgagctacagctagttggaaccacgtatttaatgatatacatatcactaacttctttgcaggaacagaaatcaactctacagaccgatcaaagaattactatcaagggtggggtatgcaatactcaatgggcgaaataccctactatgtatatgaattcttcaaaaaaggtatcgaagacggcaataattactactcattgagtcagacccgtagccgtagtgccgccttcttcgccaatgctacctactcttataaaggtcgttatactgtgaatggaacagcccgctacgaaggtaccaaccgtatgggtaagagccgctcggcacgttggttacctacatggaacgtatcaggagcatggaatgcccatgaagaaaaattcttcagcaatttaacttctgttctttcacactttacactgaaagcatcttattcgttaacagccgaccgcggtccggcagacgtaacgaactcacaggctattataaccagctatagtccttatcgaccatttacttctatccaggagtccggattgtatattaaggaactagaaaatagcgaattaacttatgaaaagaagcacgagttgaatattggtgccgacatgggcttcttgaataaccgcattaatttagctgtagactggtacaaacgtaacaactacgacttgattggtatcgttaatacacaaggcgcaggtggacagatcctgaagtatgcaaatatcgcttcaatgaaatcacatggtattgaattcactttatcaactaagaatattaaaacaaaagatttcaactggaacaccgactttatattctctaatgcaaaaaatgaagtcactgatttgaaacaaaatgcgaatgtgatggagcttatttccggtaatggattcgctaaacaaggctatccggttcgtgggctattctctatcccatttgtaggtctcgacaaagatggtattccagtcattataaatgaaaagggcgaagcgactagtaccgatataaatttccaggaacgccaaaatactggtttcctgaagtatgaaggtccgactgatcctaccattacaggtagtttgggtaatatgttctcatacaaaggtttccgtttgaatttatttatcacttattcatttggaaatgttatccgtttaaatcccgtattcaaagcatattattcggatctaacggcaatgactcgtgaatttaaaaatcgatggacactccccggagacgaagcaaagactaatgttcctgctattttgagcaaacgtatgtacgacagcaatgaagacttgaagtatgcctacaatgcttacaattattcaacagaacgcattgcaaagggggattttatccgtctgaaagaaatctcactggcttatgacttccccaaagcatggatcaacccattgaagttaacagacctctcgctgaaagtccaagccaccaaccttttcttaatctatgcggatgataagctaaatggtcaggacccggaattctttaatgcaggtggtgttgcctcaccggttccccgccaatttactattactttaagactggggttataatttaaaataagaacgaatatgaagaaatacataataatggccagtgtggccgcgctcgcaatagggctctcatcgtgttctaatttcttagatgagcttcccgacaatcgtaccgagctgaatgaaaacaatgttggcaaaatattactttccgcctatcctactacagcaatctgtgagatgggggaaatgtcatcagacaatactgatgcttatccgaatcgcttttcttctttcaaccgtttgcaagaagatctctataagtgggcagactctgcagaacaagatcaggactctccccatgcactttgggaatcttgctatatggcaatctctgcctgcaacgaggttttgaaagtgattgaagacgcaggaaatccagcttctcttagcgctgaaaagggagaagccctagtatgtcgcgcctatgctcattttttacttgccaatatattttgtaacgcttatagcagccaagcaagttcagacttgggtatcccctacatgaaaacgatagagacaaccgtaagccctgattatcaacgcggaactctagaggaggtataccaaaatattgagaaagatctattggaaggtctagatctagttactgatatttatgcagtccccaaatatcactttacaaagaaagcagctcaagcttttgctgcacgcttttacttgtactatgtaaaatcggataaatccaattatactaaggtgatcgattacgcaacaaaagtattaggaagcaatccagccacctctgtacgcgactggaaatctttgggtgcactagacataaatggcagtgttcagccaaatgcttatgtagatgcaacgaatggcgctaacttattattggtcagtgcaggttcttattggggatatgttcatgcaccttatggactaggcgaaagatacgcccatggaccgaaagtaggcaatgagacatgcaattctgttggtccttggggaagtgactattacatgggtgtttggagcaactcaagtgcactgccgaccaaaatcgttgttatgaaaataactcaatataaagaagtggttgacgcagtagccggaacaatcaacggacacatgatcaatgcagcatttactacagatgaaacattactctgtcgtgcagaagcttatgcgatgaaagaaatgtatccacaggcaattgctgatttaaatatatggcgagaagcatacacacgttctactaccccgcttaccacagaatctataaacgatttctacggaagcatggaatattacactcctactgaatctacagttaagaaaaaattgaatcccgactttactataacaaatgaaacacaggaaaatgtaatccactgcatacttcatgcacgacgtttaacaactttacatgaagggttacgctggcaggatattaaacgctacggtattactatctatcgtcgtttaatgaatgataatggtactattaccgtcacagataagctggaacccaatgatcctcgtcgagcaatacagataccgagcgatgttatttcagccggattaaaaccaaaccctagaactaaataaaaatcgataagttatgaaaaaatatataatatatacattgatcgttactatagccgtttttttaggctcatgtaataaagatgatattgataccaaacgcagtatatttgatcctactgaagtttatgagcccaacgagtttgacaaatggctacttgacaactatgtttacacttataatatccaggtaaaatatcgtctggatgacaatgaaacggatgtagaatatcatctggttccagccaagtatgacaacgcaattacattggctaagattgtaaaatttgtatggatggaagcttatgacgaaatatggggaattgacatgacccgtacgtatgtccctaagctactccagttcattggaaatgttgcttataccgagtcaggtatgatcctcggacaagctgaaggaggaatgaaagtaaccctgtttcgtgtaaatgaaatagataaaaacaatctcagtgtagctcaattaaatgagtactatttcaagacaatgcatcatgaatttacacatattcttaatcagaaaaaagcctatgatacatcatacgatcgtatatcggaatccgactacgtaggttcaagctggtatagggtatctgagtcggttgctctgcaaaaaggatttatctctccttatgcaatggaccgtgctacggaagattttgcggagatggttgctatttatgtcaccaatgacgctagtacttgggaagatatgctagcaagtgccggcacaacaggaagaccgatcatagaaaagaaatttgagattgtatttgattacatgctcaattcctggggacttgatttagacaaattgcgcgaaattgttttgcgccggcaaagtgaaattaccgaattagatttaagtacgctttaataattgtaggatatgagaaagattaaaatatatggcttactgacttgcgtttgcctgatgatgcaatcgtgtctgtttaatgaagatgatatctttgatgaatcttctgcacaacgggctatagcctccgtcaacgaatgtcaggagattttaaagggcgcagccaatgggtggttactcgagtattatacaggagaagacggagaatatggtggcttcaatgttttggcacgatttgatggcaataatgtaattatggctgcagatttcgctacagataattacgaaattggagaagaatctacttccttgtataaagttgaatcataccagggaacagaattaagttttgattcatacaatgaattaattcacgaattctgtgaaccgagtggttataattcaccaggatatgccggagattatgagttcgtcttcagaagcgtttcaaaagaaaagatcgtactgactgggaaaaaacatggagtaacgttgatcatgacacctctgcctgctgaaacaaattggcaagagaaactgaccaatattgccaatgtcgtttcacaggcttcatatgtaacctataagttaattgtgaatggtcaggaaataactaaaatgggacaggaagagcatgccttctcagttaccaaagtagacgaaaccggtgaaacaaccgtaagtctatatccgttcatatatacagaggaaggcattaaaatgtatgaaccattagtagttaatggagtagaaataaacaacttcaaatgggataatgaaaaccttacatatatttgtacagatacaggtgtagatgcaaaaatagaattctattgtccggaaggatatctcaactatttaggcaactatatactacaattagcaaatgggcaacgtatacaacttgagctcaaacaaaaaatgataggaaaatcatttgcaatgaattttgctttgagtggtactcctattgaatttgtctataactataatatgacaacagactgtattgatgtaccttctcagacagttggcgtatatcaaggttacaacgtattattatatccaggaattcccggaggcaatttctatgcagatgactcagctgtattccaaggacgtattgcaaatacagatccgcttacaattaagttcacttatgtaaacaatcctatttgcacccttatgttgctggtatatcaaaaaacagacggttggtatggattctctacaatgttccaagatgtaacattgataaaagttgattaattaacaaatagcatattatgaagaaaataacaagcatatttgcattattattatgcgtattcgtcttctcatgtagtaacgacgacgataaagaaacatcttctttgcagattgttagctcaaatgtcacatttgaatctgctggaggaaccggtacaataaaagttaacgcaataagtgaaattactgctacctccaataaagattggtgtaccgtaagcgtgaatggagatattataaatgtttctgtcattgaaaataatgatatgtccggacgtacggcagctgtaaccataacagatggtgaagcatccactttggttcctgtttcacagggtggctgtgttattctgtataataaatcagaattggggcatgcttttacttatgcaggtggttctgctacagtatctttctcaaccacagcatcttattcaatagaagtacccgccgaagcccaaagttggttatcatacacacttgacgaagaaaacagaactataacatttaatgttgctgcgagtgctgataaaaccccacgaggagcggcagttaaagttaccgcaggtaaaaaaacgatttactatcatcttggagagtatgaattgaaagacatcgcaggcaaatggagagtatcctttgttgatggagatgatagtactctagctggagaaatagaagtagttcaggatgaagaggaacctaccatcttctacttgtcaggtatttccaatttctttgacctaccgttaatctataatggagaggccttactcacaatgggaggtcttaatttaggaacatacgctgggagatataacatctatacagtaacattgtctgaaggtggatatgtcagttgggatatgtcaacgcaatatgttgcttatccgtcatccatcaatggcaaatttgccttggtatttggtgataatggctcctgggatggagacgtagtcaatggcattgcctactgggcattctccggtgctgcgggaacaggaagtgcaggatggttggagaaattcaacgctcttacactaagcaaataagacggcaagcgtgcttagctaagtctgtctctctaacatgtataagatttagctttacattaattattcatataaagggtgttcaacattggacaccctttacattatccttttccatataaaaagcaatacaaaagatgatgttattattaaattaattcgtatctttcggacacacaaaaaagttaaaccaacaatcacacatatgaaaatgattcttttccgactaatatgtttaaagacatgcctactattaatccctgtactttacgcacaaaacaactatcgtccgggatttatcatcactgttcagaaagacacaatatatggagaaatcgactaccgtacagataagatgaatgctaaacgctgcgtctttcaatcacaaggtaatgataccgaaccagtaacctatcatcctttcgaaatcttgggataccgttttacagacgacggtaaatactatgtctccaagaacatagaattgaaatacggtgtctctacccccgtctttctcgaatatttgctacaaggaatgaaaagcttgtactactatgagacagaagataacataccaatctattttgttgaagataataatacccttgtaaaaatagatgcgcccaaactgtccaagcaggctaccaatatacagtttaaaggccagactgaccgatatattccccttcttcattacgcattcaaagactgcccaagcctggctccccaaatagaccgggctcgtttcagccgaaaggagatgataaaaatcacaaaagaatatcattatgcaatgtgtaccagtaatgaagattgcattgaatttgaagcaaaagaagataaacgttcaatacagttagatataactccttatgtaggagttattcaatataatgtaccatcgggtagtccgatcgggctctatagctcacccgaactatcttacctggcaggagtcactttagctatcagcaatagacggtggatgagttcgctcagtggttgttttgatgtgtctttttcccgcataacatcctctgcaagatcattgaataatgaaaattcatccactatatttaaacatagcggaacaatgttttcgggtaagttaggaatacgctatacctatccgaaaggaatggcgcgaccatttgttgagcttggagcagacttcagtggaatgatcaatgccaagataaagataaatgataagagcgagagatggctggatggtgtctaccctggctattacgccaatgcgggagtaaacttcaaactttcgcggaaaaacaaacaaatgatatgcatacgcgctcaattcaaaggcttaagagacatgatggaaaaatcagccctcgttaatggatggtcaggagtgataggatatacattttaagtactgcattattcgtttatatagtactcacactaggaaatctcttataaaaccgtttttcttgttatacccatattctacccgacaataaaactccccttatttcagcctttcgaatgaaataaggagagccttatataactgggttatcagctattaatacttgacttctcaggtattaataactgacgcgacaagtattaatacctgagaagtcagatattaagacctgtcgtgacatattagaacgtttgtaccagagtttattaactaccgtcttagtaagttactgtcaacggtgtacgcaccttctgcgcatactcagccatatacgcattccacgcatcaaccgtcttgatagcagccttatcccaggcagagccccagtaataagtatattccgagcccggttcatactcgctgattgccaatacatgaccgtcagctccaccgcgcagctccttcttctccttttccgggaaaagaacggtctttgcctcttttaccagtgaaggaaatgcagcgccgataaatatcttaccgttaccgccgcttctgtcggttgtagggtctacataggtgatatagccgtttgcagcgtctgctgtaaccacaccgtccggttcacgaagaacgattccggtagtcacaggcatcgcttctttcaggttagtatacgaaacaacggttttgttgagatacgaaccggcatccaatgtgatgacacgcgtctccaccacgttagaatcgccacggacagtcaacgggttaaattccagcttcactgtgaaacgcagcgggccattatcaaggatttcctgtgtccgatagcaataaggatagataatcgtatcacccgccatcagagcggctgtaccgcagcccagcgtaggacctacggcataacaatccattccgtagccgtggtcaatgtgataagagatggcattttgcagttcggcagccgctttagggtctgtctttttcagttcggcaattctggcacgcttttccttatccagttcttcagcgtaaagactttcaagaatcggttccgtagtgttatacttcgtaaagaggtcgtagccgaaaccacgttcaccacgcttctgcaaggcagggccataggcacggtatccgcccaggtcattctcccatgccacgtcgtccagacgttcgggataatagcggccgcaggcaattacattatacgggtcgggagtaccggattggatagtataagtggctgtgccatttgctttcaccgtagccgggaaaaccactttctcgtcatacgtcacttgataaggtacttgctggccatcttcaccaagcactacgatctgagccgtatcagccagctgcagcttggctgtaacgtcactcatcggaacttcaaccatttcacctgtgcgctccaacgccagaggattggtcactgtaaccgtcattgactgcttgctgtcagcacaagaggcaaaacccatcagggcaatagcagccaaaataaatatcttcttcatattatacacaacaaataaggggatagaatcaggtaaaaaaacgaaaggggataaatgtaaaccgtaaactattcaacagaaaaacgataaggtgacaggcggtaaagaatctccttaccaccctatcaccttataataatctcttgttatcgttatttcggctgttttccgatataagccaggataccaccgtctacgtaaagaacatgaccgtttacagcgttagaagcctcagaagccaggaatacggcaggacctgtcagttcttccggatccaaccaacggccggcaggagtcttggcgcagatgaatgaatcgaacgggtgacggcttccgtctgcttgtttctcacgaagaggagcagtttgcggagtagcgatataacccgggccgatgccgttacactgaatgttgtattcaccatattcagagcagatattgcgggtcagcatcttcagaccacctttggcagcagcgtaagccgatacagtttcacgacccagctcagacatcatagagcagatgttgatgattttaccggcacgcttcttcatcatggcaggcaacacagccttagaaacgatgaacggagcgttcaagtcgatatcaatcacacgacggaagtcagcagcttccatttcgtgcataggaacacggcggataataccggcgttattaacaaggatatcaatcgtacctacttctttctcgatagtagcaaccattgcctgaacagccggttcgtctgttacgtcgcatacataaccgtgagctttaattcccttttcagcataggcagccatgcctttgtctaccaactcctggttgatgtcgttaaaacatacagtagcgccttgttctgcgtaagcagaagcaattgcaaaaccgataccgtaagaagcacctgtaacgagagctactttacctttcaaagaaaaattcaaatactgattcataattttttgttattaaatgatgaaaactattgtagttgtttattttaaatctgtaattaatgagaagtcctgatcgccataatcgaggttttcaccgcccataccccagataaaggtatagttgtgggtagccgcagccgagtggatcgaccattcgggagacagaacagcctgatcgcccttcatccatacgtgacgagtttcgtccacctcacccataaagtggcagatagcgtgctcttcggggatttcgaagtagaagtaagcttccatacgacggctgtgcacgtgggcaggcatcgtgttccatacgcttcccggagcaagttccgtcatacccatctgcagctgacaggtaggcaatacctgattgaccagcatcttattgatgttacggtggttggaaccttccaacgagcccatttcagccactacggcatccgctttcgtcactttacggtcgggatagttgcggtgtgcggtcagtgagttgaaatagaatttggcaggattggaagcgtccttgctttcgaacgtcaccacacggtcgcccgaaccaaggtagagggcttctttatagtcaagttcgaaaaccgcatctccggccttcactacgcccggtccgcctacattgtaaatacccatttcacgacgggtcaggaagaacggagccttcagcgggtcgatcgcttcgagtgtcagcacctctcctaccggaagcgcgccgcctacaaccatacggtcgtacatggagtacaccatattcacttcgttgggaacaaatattttttcgattaagaaatcgcgacggattcttgcagtatcataactttttgcatcctcgggatgcgcagcatagcgaatttcatagttcgttttcataccttatttatttatagttattgaataagctctctttctcaaatgcacatcgtttacgtacacgatgcaaaaatagtaaaagaaaacgggttaaccttgcaattttgttccaattatccaccaaaaatgtccagaattgatgcaatgtacatctttttaacgaactataatacgttttgaaggagtttgacgactattttcaatgatacaaaacgatataaaaaaaggaagctccaataatcaatgattatcagagcttccttttggttgtcctaccaagattcgaacttagacaaacagaaccaaaaactgttgtgctaccattacaccataggacaaacatatgcgctttctgttaaaaagcggtgcaaagatagaggtttgcaagcaaacctccaaatatttcgattacttttttactttgccaccttgcaaatcgctgaattttacttcgcgatcagcagaaaatagttctttttaccacgctgaacaagcagatatttcccgtcaagcagatcggcagtcgtaataacctggtcaaaagcttccagtttttctttattcaatgatacgccaccgccttgaaccaacttacgcatttcgcctttcgaagcaaatacagccgcattatcgacaaacagatcaacagccttcactccttccgccaaggcgtcacgagagatttcaaactggggtacgccttcgaatacagccagcaacgtatcttcgtccaacttgcgcaacgactcggaagtagcgttaccgaacaggatattagacgcatctaccgctgcattgtaatcttcttcggagtgaaccatgatagtcacttccttggccagacgtttctgcaaagcacgcaagtgcggagcctgctggtgctcggccactaatgcttcgatttcttccttctcgatcgaagtgaaaatcttgatatagcgttctgcatcagagtcgcttacgttcagccagaactggtagaacttatagggagaagtataacgagggtccaaccagatatttccagattcagttttaccaaacttaccaccgtcagcttttgtgatcagcgggcaagtcagcgcgaacacctctcccccattggtacggcggatcagttctgctccggtagtgatatttccccactggtcggaaccgcccatctgaagtttacatcctttagtttcatacagatgaaggaaatcgtagccttgaagcagctgataagtaaattcggtgaatgacagtccgtcacgtgcttctccgttgaggcgacgctttacagaatcctttgccatcatatagtttacagtgatatgcttacctacttcgcgaacaaagtcaaggaaagaaaactctttcatccagtcataattgttcactaattcagcacggttaggcacatccgactcgaagtcgaggaacttggcaagctgttttttgatacacgcctgattgtgacgcaatgtttcctcgttcagcaggttacgttctgccgattttccggaagggtctccaatcatacctgtagcgccaccgatgagtgccagcggcttatggccgcagcgttgtaaatgacgaaggatcatcactccacaaaggtgaccaatgtgtagcgaatcggcagtcgggtcgatacccaaataggcagtcacctgctctttgtttaacaactcttccgttcccggcatgatgtcctgcagcatgccacgccatctcaattcttctacaaaattcatcgtattactctttttattaggtttttattgtctttcaattccatgtgcgacaaaagtacgactctttctcggaagatacaactcttaacgcctaaaaaagactttttgaatattttcccgaatcgcctgccgcagctcttccgcatccgtgcttcgtgctttcgccacctgcttcagcacttcttcaatgtcgaccggactgtcatccgtctccagaaacaggcgaccgacaggcactcccttcaccgtttcctccgaataatgcgcaccgaaagaaagataaatgccgttctttatcagttgccctgcctgctgcggtttcccgcgaaagccgtgccaaatccagggttgagccggattcagtttcttcctcaccgccagcaactcatccatcgccttcacacaatgaataatcagtggcaaccgatatttctccgacaattccacctgcttctcaaacatccttacctgaagctccatcggagcagctgtcagtttatcgaaacccgcctctcctaccgccacaaactgctctttcacaagcaactgctgcagaagttcaaattgctcttccgcattgcgttccgtcagtttccagggatgaatgccggccgaatagaaatatccctctttacctgccgtcctgacatccgaagccgacaggcacagcgaatcatccaccggtaatggaaaattgataatcgccctgccgtgggaagcatcctccgacttgtgagtatgaatatccagaatatgactcgcgttattctccatatctctcgttctttagggtaaatcgtttttaaggcacaggatcataaccggaaccaccccacggatgacacctgagaatgcgccggacagccagatagagtcctttgacgggaccgtgtttcttgattgcttcgaccgcataggccgaacaagtgggcgtaaaccgacaagacggaggggtaaggggcgaaatacacacccggtaaaaatagataggaatcagcagtaagaatgaaaacaccttcctcacaagacttttcagggacatccagcagacggacacccggtgagcacggggtttcataaggataacttttcagaaatgcgcgaaagcgctgtcttcattttctcttccagttcggcagtggctacaagttcgtccgacaaatagataaaagcgattgccagacgctgccctttgttttgcagaccgtccagcagtggctgtttgttcttccggtagacttcgcgtatctgccgcttcacccgattgcgctttacagcacgtttgaaacgccgcttcgatacgctgataagtatcgttgccggcacttcaccttgttctatgggcatatatacaacgcgtatcggaaagatggaaaacgacttggaatggccgccttcaaacatctttccgatcaatattttactattcagcctttcggctttacgcaaagtatatacgctcacgctgtttatttattgttttccttgatgaacatatcaagcgcagccgtcattgacggagcctgcacagtcggtgcttcaaggtccagacggagtccggcgtcgcgtacagcttgcgcggtagtcgacccgaaggtaccgattctgatctctttctggtcaaagtccgggaagttcttcttcaaagaagtcactccggcagggctgaagaacacgagcatgtcataatcaaattcctcatccgatgtaaagtcattgctcactgtgcgatacattacagcttctgtatgctgtatgttattcttgtcgagcaggtttttcacatcatcattgtgcacgtccgacatagggacgagatatttctccgttttatgctttacgatagatggcaccaaatcttcaatctttccggtagcaccgaagaagattttacgtttgcgatattgcacatacttctgaatgtacaatgcaaccgcttctgtgacacagaaatacttcattgtttccggaatagtcacacgcagctccgtacacagattaaagaagtgatcgattgcgtggcgtgaagtgaatataacggcagtgtgatcaagaattgaaaccttctgttgccggaattctttcgccgaaagactctcgacctttataaacggccggaaatctatttttacgccatatttctctgctatgtcgtaatagggagatttctctgacgcaggcttaggctgcgaaactagtacttttttaattttcaacgtcctaaatttttattagcaatacattgtttacctggatcattccctgatagagtagcagacagggtatgatttcaagagcgcaaaagtacaaaattaataggaaagccgcacttaattgatgaaaaaaaagctttacccacttataaaacatcaatattttagtaaaaattagaataattagtccgattatcactaaattggtcagattcagatcgaaataaacaaggaatagaacaaaaggaaaaagggcgaatccgacgtaatatatgagcgtagaataagattccagccatatatttgtcttgtttttgtcaaaaaacacccatccgaggaacatataaagtaaccatttcagtaaaaaataggcaagacagaagccgacataaatccccaatagcaggagaggggagaccttggtcatcagcatcggacatgtatcatgaaaataattgaagaacacgatacctgtcaatacacaggtctgcactaccagtacgaggagatagcgcacatcggctgccgtagaactatcaaaaatgcttgtccgctcgcgatgcagtacaaagtctttcacctgttgggtgagaaacttctttccacgagccagagcgatggaggaaagaaagaagcaggcaagcaatgtcaaggcaatcacatcatccgtacggggagagtaggagatagggattccctcgaatccggagttcagtatatcggctatcatatggctgcaaatttacggatagaagcgtcccatacgggagttgtctgaagtaactccaccgcttcttccggtgtttgtgccactttccatatatcaccgtgttgctggcgcatgaagttttcctctatggcccgttcgagcatttggagtagcggatcaaaaaagccgtttatattcaagatgataatcggattcagatacagtccgagctgtttccatgtgatgatttcaagcaattcttccaaagtgccgcatccgcccggcaaggcaatgatgccgtcgctcagattcgccatcttctgcttgcgttcgtgcatggaagtgacttcgatcaattccgtcaacccagtgtgatgccagttctgttcgaccatgaagtgggggataacacctgtcacttcaccgccattcttcagaactgcgtcggctacggagcgcatcagtccgatgcttccggcaccgtttatcagacggatatgttgtttggcaagcaggctgccgagtttttcggctgcttcaaaatatacgggggctatcttagtgctggatgcgctgtatacgcatacggaatgtatctgattcattgtcttttgcaagtttactggatgaatgggtacaaaagtacaaagaaatcatatacatatcaaaatgaatgtgcaatttatgtcaaagtgaagatagaagaataaacacgaaggcaagactgcatattctatttctataaatagcacagtcaagcctatattctcctacttcaacactcattatttaaatattggcataaaaacagaaaattgaatatttcgtgaagttacttttccaacaccactagtattcatcagattgcaagtaccttgtttataagatagttgtagttcaagccatttcagcgtataactaactcttgccacaataggtatatcgatcgcattttttttgctattataagtagatgcacccaatcgatttacataccaagccacatctgctccgactccaagtctaaaattagaaaaacattcataactgaacacagtccctattgatagatattttccgtttacactatacttaggactatccgaattgaaggcttgataatcagtcccctgcgagccaaaaagagcaatgccatccattgcaaatttacgattaccccaatactgccgataagcatatccaatatgataatgaagtttatatccctcaaaattactggaaaccacactcactttttcatgcaatgttcctaaagagcctcctaaaacaggaccatgttcctgtgcagataatgatgctgtaataaatagcaaagctataaatattaaattagtaattgttttcattagaagttcagtttttattatttaatatacaaatgatgaggacaaaagagtttatggttgttgctactttcgtcctcatttacacttttataatctcacagtggcaaatcctctttggtcatacggcacaccccgagaccagatttctattgtacccgtacactcttgtgctaacttacgtccaaaaactttggttacatttccacccatttctttggtatcaatagcaaaaggaataccatctttatttacatacactggaccataccccagtaattctccttgagcaaactcaaaaccacgaaggtttactttagcatggtatgtcgtagagtaacggctccatccaaagactcctttcttttgcgaagtaaaattagcatgtattattcctgatgaaacagataaatataatcctacttttctatctttttgacgactatatgcttcgtttatagaacttaaatctgaaacagacgaacgagtagaaaccgtaaattgttgttgacgctctttaaagtcagtatataccttatccacaaccaaagaatcgccaatcataaattcacctttcatattaacaaagtattcattggctacataaacaagccttgaataaggtgacagatcagtagcatcgatagtattaaacataaatacatcaccatatttatgtttatatttctcatatagaacatcaaactccgctttatcagcagcttgattacagattttatccaactcaccatccgcttcttgcatcagaatcatctgagacttaaaagataatgaattaagaaaactaacttgttctgaagtagacattgcactcactttcaaaagagcattctcgtacgattccacatctttaaatttaatcatagtaccgtcgtttattacttctatttcagaattagcattcgtcggtttaaccatattcacttcctattcatcattggtacaagaaataaatgcacctaaacatactgttagtgtcagtgttgaaaatagttttttcattgttttttcttttttagttaatatcaattcgtagttgcaactatctttatgctattttttatgactcaattatttaatggctttttctatccttcaataatcctgtactcaaaatacccttaccaaaactttgaccagattatctgctacaaaagtagagataatggaggtatcgacctagatattcaattcagtaataattcagaaataaaaaatgccatttgatctaaaaactgaattatttctgaactcatccatactaaacaatcagacaattagcctttaatttgcaaaaaaaataaacgaacgatcatgatgaaaaaactactatttattgcaattattgcagtattaggatgcacagcactccaagctaaaaatcgcatcagaataaaaagagagtcttgggaagtaaaagcaagtactagagtgccaatatctaccccccttaatctttactacgaagggagtacactctttattcatgctaatatagatttagaaaacattataattgaagtaaaggattccttcaacaaaactatctacctagaccttacaagtattcaagctaacaatgaacatgtatttactctggaaaatatatcttccggagaatatattatcgaaataaaatccggcgaaaactatattatcggttgttttatattataagtcttgatatatgtgtatatttgcgcaaataaaatcgcaatgatacatacattcaaatgaaacaaagacgaaaatttatactattctatttaagcattatatgcctattctcatgcactgccccataccccaacacaatactgcgggtggaaaatattattaaagaatatccagatagtgcattaaccattttagactctctgagtgagagtatcacaaaggaatcacaatcagcaaaaatgtactattacctgctgttaacagaggcacgtgacagatgttacgtgcctcatacgtctgattctctaatgttatccgtcactgattattatgaaagagagaatgataaggacaaactgataaaatcctattattacacaggcagagtataccttgatcttcatgaaggtcctacagcactttcttatttccacaaagcttttgatatctctacagatagcaagaactacgctttattggggcgaatatacagccaaatgggaactctatttgcctatgaaggtctcacagaggaagtactacaagcttatcgaaacgcttatcactacttacaactaggcaaagacagtcttactagcgcttatgcactacgagatttaggaagagcattcaatttacttgagataacagacagcacaatctattattataacaaagcataccaattagctaatagcaatggagacatacaaagggaagtaaatattctcgaagaattggcaggcatctatattcaaatgggaaaatatgacgaagcattgaaaacgctacaagaaacaaatagtaaatggcaagatgagaaagatataaattatgatgtttggggaaatttctatgtaagtataggacaaaaagattcagcagcctattacttcaagaaaaatataggacataataatgtatattcagacataggagcctatcggaatttatatgaaatagaaaaagaacgtggcaactatgaagaaggattagcatatctggagaaatatacagaatgttctgatagcatttacgacatatccaacacagaatctttgcgaaaaataaaggctttgtatgattaccaacatattgagaaagaaaaagaatatttgcgcaagaaaaatgcagaacaacgagcatggatcatctttattgttattgccatcgttttaggagttatcatccttattcgatataatagaaacaggaaagctatgattcgggaacaagagaaaaaacttcatgagattaacgaacaacaatatcggaaaagccaactatatatagaagaaaacaagaaaaaaattgaagaattaaaagaaaaggtaaaatcgttcgaacaggaaaacaatgatttacaacaaaaacttttacttgcaaaaaaggaaaagctagaacaaaccaatcaagctatcgaaacatcacaaagagaacaagcattacttgaggaagcgcttagaaggtctgatatttatgcttattgttatcgtgcgatagaagattcctcgatcagactcaccgaaacagaatggaaagaactagaaaatatcattaatgatacatatgacaatttcaccaacaagttattcatactgcatccctctattaccaagatggaactacgtatttgtttactgttaaaaattaaaattccagtttctacaatttcacaattggtatgtcgtacacaaagcgctgtatctatgagcagaaaacagctttataagaagatattcaataaagaagggacacccgcaaacctagatgacttcattgtctctttttaaaaagatgaactaaatctctgatattccacacaaagaagaaatacccgcattcagaatcttcagtttcacccgcaaacgccctgtcggaaggggatagcggctgaaggcacagttttacaactccattcttgaagctttatgaagggagtaaggtgcttcagtcctttcagtccccaaaaacaatttcgaacttgataccgttcaagatatcagatggtacctctcagtgtgtcagaaagtaccattccgcaggtcagccagtaccattccgcaagtcagccagcaccattcaaggagttggaaatctccccatattttattcattcctacacaggctttccgctaattactatccgagtcactgtgtataatgaataaactctgccaacagttgaaatagaacctgcatttacctcaaacagagcctgtattcaagataaacagagcctgtatccaaggcaaacagaccctctgtttgatcagaacacactcttcgcttgattgatctgaaataagccggcagctcgccaactttcacctcggaggcgaacagactttagctcggcgatgaatgaagttcagctcagggcttacaaaatttagcccgtatgtcagggctgaaagaactgaaaccacctgccccctttcaaagtatgtcagagacggggttgtaaagcagtgttttcagccgctatccccttctgacagggagcttgcggacgaaactgaaaaagctgaatgcagattacaggataataatagcatagaataaaagtcatacatctttcattcaattgttgtacatctccgccccaaacgttatacatcatcaacctaactgtagtactgaaacccagcaactgaagtacttctcacaaccaagtcatgtactatatatcacaacccatactttgtgtcagaaatcaaaaaatagtcatctgctgtttacaagtttgtcaaccgcaacaaatataacgattttattaatcataacttataaacagttcaaattcaacctatttataagtcgtaacttataaaatcgcccgaataacaaaagccgcaatccatctctcccgtataagaagagatgagattgcggctcactatggactaaatagccgtaaagctataagctgatttcaaataaaattacagaccaaaagctgccttgatcttatccacgtagtccagtttctcccatgtaaagagttctacttctacggtcttattgccctcatagcgggagaagaacgttttcgataccacttgcggctcacgtcccatgtggccataagcggcagtttcctgatagatcgggttacgaagtttcagacgctcttcgatagctttcggacgaaggtcgaacaactggtcgattacacgggcaatctcgccatcggtcatattcacgtggctacgcccgtaagtgtccacgaagatgttgatcgggcgtgctacaccgatagcatagctcacctgtacaagcatttcgtcggcaacacctgccgcaaccatattcttagcaatgtgacgggcagcataagcggcactacggtccaccttgctggggtcttttccggagaaagcaccaccaccgtgagcgcctttgccaccgtaagtatccacaataatcttgcggcctgtcagaccggtatctccgtgaggaccaccgatcacgaactttccggtcggattgacgtgatagacgatctgatcattgaacaatgccagtactttatcatgatggatagaagcaatgacacggggcatcaggatttcgataacgtcacgacggatgatagacagcatttcttcgtcagctttgagctgtgcttcggcagagtcatcagccggctgaataaagtcatcgtgttgcgtagaaacaacaatagtatcaatacggacaggagttccgttgtcgtcatattcaatcgtcacctggctcttggcgtccggacggaggtaggtcatcaccttttcttcgcggcggatatcagccagcacctgcagaatgcggtgtgccagatcaagcgaaagcggcatatagttttctgtctcgttcgttgcatagccgaacatcatgccctgatcgcccgcaccctgttccatcgggtcctgacgctctacgccacggttgatgtcgggactttgctcatgaatggcagaaagcacaccgcaagagttactttcgaacatgtactctcctttagtgtaaccgattttcttaatcacttcacgtgcgatgagctggaggtcaacgtacgctttagttttcacttcacccgctaatactacctgtccggtagttactagtgtttcgcaagctactttagaactggggtcgtaagccaacagtttgtcaagcacggcgtccgatatttgatcggctaccttgtcggggtgtccttccgacaccgattcggatgtaaataagtatcccatctttttaaattaaagattataaattgaaaattaaaattgggaaaataaagaggggaggaagagagctgcggaagcattgccgaaaaggcgtcaacaagacgtgttttagcatttttttccgtggttgcaagctgctcaaatctgtccacactttcatttcggggacaaagataggtattattcggagattatatttatctttgggcaatgtttaacacatatatacaggaaattggtatgagaacaattacattaatgcaatatgtattttccattatccttctggtcatcatcttcctcgtcatggattatttctggaaaggagacgaattttcatggacgtatgagtttgcaaaaggaggaatcggcggaactatcatctgccttctgaaccgtcatttattcctccgccatcctaatcctaaacagaaaaaaatatgattatcaacaataaattaagaactctttttgtactggcgctttatataggattcaccattgccatttacgccattgtatgccacttcctgaagattgagtttcaggatattcacttgttatatgcagtattggtgggctgtgtggcttatctgccgaggtttatcgccgaaaagaaaagtaaaaagtaaaaggataagcaaggggaagagaatgctgtattatttttctatctgcgccagcagcaccttcattgtctttcccaataccggatgcaccagttcgggggcaatctccgttaaggggcgcatcacgaagtcacgttccgccatcaaagggtgggggaggttgagtgctgctccggaaggagaagtaaccgaaagtatcagatcatcataaagcagcaggtctatatcaatcagccggtcgctatatacgccaccgacagacttatgcgtacgtcccagttcccgttcgatctcctgcgtcttctgcagtacttccaaaggcgacagttccgtttctacacacgccgccgcattcaagaaactatgctccgaatcgaatccccaaggggcagtgatgtaaaaagcagacagggaaatgactttccctacctgctcctctatcttttgcacggcagtccggagattctgttctttatctcccagattagtgccgagacttatatacactttcgccattaccggtctattctaccttaaactcccgctccctgtccaaaggaacaaagaactctactttgccacatttcgggcagacatataagtcgaatgcttcgcgattctggaataactcaaacaagtttccaaaaatgcccgtgttcattccttcatgaaactcatattttccggaataaaccatcctgacctggcagcgcagacagtcgatagaccgcccgctatcatcactctcttccgccggagtcatatccaatatcttatcgtccggaaagctgtaattacagttccaacagatttcaaagctatcttctacttcttcgtggcatttgggacagattttcatagcggtatcttttcgtttatttatccagaatcagcatcgcatcaccgtatgtaccgaagcgataaccttccttcaacgctacatgataagcatccatcacctgttcgtaaccaccgaaagcggccacaatcatcagcagtgtagacaatggcatatggaagttggaaatcatcgaattggccacagtaaactcatacggagggaagataaacttgttggtccagccttcaaattctttcaaatgtccgtcggtgctcaccgcactttcgatagcacgcatcacagttgtacctaccgcacacacgtttttacccttatccttggcacggttgaccgtattgacagcttccgcgtttacaatcatctgctcggagtccatcttatgcttcgtcaagtcttctacgtcgatatcacggaagttgcccagaccggcatgcaaggtgatataagcgaaatcaatacctttgatttccagacgcttcatcagctcacggctaaagtgcaggctggctgtcggagcagttaccgcaccttcgttcttggcgaagatggactggaaacgttccgaatcttccggctctacaggacggttgatgatggaatggggcaggggagtctcacccagagcatagagggctttcttgaactcatcgtgcggtccgtcataaaggaaacggagcgtacggccgcgggaagtggtgttgtctattacttccgctaccatcgagtcgtcggcaccgaaatacaacttgttgccgatacggattttacgggcaggatctaccagcacatcccacagacggagttcttcgttcagctcacgcaacaggaatacttcgatacgagctcccgtcttctccttattaccatacagacgtgccgggaataccttcgtatcgttgaatataaatacgtctttatcatcaaagtagttcaaaacatccttgaacatcttgtgttcaatctctccagtacgacggtgcaacaccatcaagcgcgactcatctctatacttcgtaggatgcaaagcgattttatcctcgggtaacttaaatttgaattgtgatagcttcatatctattccttattacgttaattattatcttcgtcgttttctatttcctgccggtcgatccactctttaaagtgttcggggtccaggcaatcttccagacggacatcccccacacgtgtgcggatcagttccgtcagatgggctccgctctgaagcacttcgccgatgtcacgggccagggcacggatatacgtccctttgctgcacaccacgcggattcggatcgtcggttccggatcgtccagacggcattcaagcaactctatctcatcaataacaagttgcttcgcctttagttccacctcttcacctttacgtgccagctcataagcgcgcttgccgtccaccatgcaggcggaaaaggcagggggcacctgctcgatggcaccaaggaagtgcgtcagtgtttcttccaccagctcccgggtgatatgtccggtagggtaggtggcatctatttcatgttccaggtcgtacgagggagtggtagcgcccagccggagcgtggctacatattccttggtatgatactgaaattcttctattcgtttcgtagccttgccggtgcagaggatcatcactcccgtggcgagaggatcgagcgttccggcatgacctactttcagttttttcactcctatccggcggcagatatgatagcggacgtgtcctactaccttaaatgatgtccagccgagaggtttattgaaaaacagtacttctccttttttaaaattcacgttatagagttataaataacgagttgtgagtgggagtaaaatgacccacgacttacaactgcgtaataattaccgccaatcccgctattgcacaatagatggcaaagtagatcagctttcctttcttcacaatattaatcatccacttgcaggcaaggcaaccggctacaaaagccgccagaaagccaacaatcaatgataacgcagggatatcccctactacatcttcacctttcatcatctttacactatcaagcaacgcttccccgagaatgggagggatcaccatcagaaaagagaactgcgccagttttgccttgttatctcccaacagaagtcccgtagcaatagtagatcccgaacgggacagccccggcaacaccgcacaagcctgtgccagaccaatgataaaggcatctttcatcgaaatcttatccttttgacgtggcttataatagtacgagaatgacagcagggcagcagtcagcaacagcatgcagcctacaatcatcagtcccgaaccgaaaatagcttctacataatctttaaagaatacgcctacaataccaatcggtatcatcgaaatcacaatattgatcacataacgagtctcatcgttcatctgaaacttgaataatcctttgaaaatccagtcaatctctttccacagaatcaccagcgtactacatacggtagctacatgcacgacaatcgtaaatgccagattctcttccccttgtatcccaaacaatgccgatccgatggccagatggccactgctgcttacaggcaaatactctgtcaatccctgaatcaatccgaggatcattgcttccaaccaactcataatttctttttattattcttttgttttaggtttacgcaacactgcgtatatcatcgatataaagccaaacaggcaaacaacaggtgctaccttgattctgcgtacactgaaaatatccggttcgaaaaccgtttcggacgacgtaggtcccgtcatcaatagaaatccgataatgacaatcgccatccctatcgcgagcaagataaagttcactttatcgaaggcaaatttctgtttgtcagacataagcttattttgttacaagttactaaatttccaactatatgttattctcctaaatataatataaggtattggctttcatcctcagatatttattcatcgagatgtaagcacacaaccacgttatcacaattccgaataccagcacgctgccgcagacaatgagcatcacttcgggtgtgatgacctgaatcagctcctgctcgtacgtcaccgcccagtaggcagttcccatcagaatggcatcggcaagcatacctgccaatacgccgctccacacgtttttccgcaggaaaggtccgcggataaaactccagctggcacccaccagcttcatggtatgaatgaggaagcgcttggagtagatggcaagccgtatcgtattgttaatcagtgcaaaggatataaaggtgagcaccaccgccagcgccagcagcacaaggctgatgttccgtatattctcattgacggcatcgatcagctctttccggtagagcacatcctgtatgttagagttcttcttgatcattttctctatcttcgcgatactgtcggaattggcgtaatcggagtgaagcttgatctcaagggaggccgtgaaagggttatagccaagaaactcttcgggatcggtgcccatcgcctccgtctgctctttcagagcctgttttttggagatgtactcggactgtttcacaaaaggttcctgattcagtttcttctggagtttcagaatatccgcttccttcatgtcatcactgatgagaacggagaagctgatattttcgcggacgtatacagacatattgtgcgccgtaagcacaaagaacacgaccagccccaacagcaacaacaccaatgtcgtactgatactggacgttatgaattgcatatcgaacagtgacttcgacttatatctgtttttatttcccattcgctatctttttttccggaatacgtaaatcatcgaactgctccgttctttccgccccaacgtgctgaaccacgcaagcgtccccgcatacatccctttgaggaaactgcacgaactgccgcgatgtttctcgctcaacatcgatacatagaacgcatcaaacggcatcggatgacgcgccgccataatgaatccatgacgggaagccagctgctgaatagtgacgggagtgaaatgccagagatggcgggggacatcgtatgccgcccaatattcaccgtaacgtcctgcatcataggaagagcagttgggcactgccacaatgagcatccctttctctgtcagcagttcacgaagcatttcccatgtttcattgaggtgttccaaatgctccatcacgtgccagagggtgatcacatcaaaactgccgggagcaaactcctgcaaagcggattcgggttttacgtccagatcgaaatgctcctttgcaaaagcacgtgcctgcggacttttctccactgcttccaccttccatccacggcgtgccatggtgtcggcgaagtacccggttcccgtcccgatatcgagcaaacgccctcttttacggtgtgcttcccttgctaccagacgcgctttgcgacccagcatataggaacgtacataatggtagatggtattcatcgcgcccttgcgcgtatcagtatgggaaatgtaatcgggagtctcgtaatacttgcctatctctgcttctaccggcacaccttgcgtgaacgtaaatccgcagtcttcacacgaacacaattcaaactgttcgcccgaagcataaaaatccgtacaagtcatgacgcgtttcaagtgcgtactgccacacaccggacaagcatttataatgagtttctccattaatttctaagcaaaattaagtgctgcctcgattcacaagacaacactattcccgaatttggtgcaaagaaacaaataaaaagtgatggattgggctttcgttaagtacttttaataatataacgttactctgacacttatttcaaagtgtatctcaaaacaggagatgaaattaaatgtgaatcaacttccctcaatcagaacagccatttctcagtgcatgaagaatggataggaatcatctcgtagaatcagaaatatacaacacaagtacggactgaactggaaaaacggaaggattcgcgattggcatatttccaaattacacagatttcactttatagcggtcaataaaacacatattagatcaaaaacataaattccgaatacgtatttcatcatttaactttcaatctaatattttcaaattcttctgtaactgacgacatccggagcaaaacaagcactcaaagtacctttttacccattcctttaaatgaagcgaagtgcttctcaccgaccaacgagtcgttcctttaaaaccaacgaagcttttctttaaatgaaacgcctcctaacattggtagttatcatgcatatttcacctatctatatccaaaaacaagatcattcctgcatattcttgcatctttttatgcagtatttcttctatcaggataagtcttaacatcccctttttaaaagtaatcttcaaaatagaacatataatttgtgagggcattcatgcgggaacgtatcttctaatttaataggctgccacaagctatgatatcaattacagcagattttttctccaccattaaaatatctcaaatgaaaattctagttaatttcagtgtcataacctatttgtgtaaaagctgatttacctaattacttatctttgatgtatacccatattcgtggatcttgtccatgatagccatcaggtatattatctggagatgaaatacctaatattctactaattctcttttcactcagcgcttttttcccttccaaataaaaaagaatatatttatctttgtaattcatagcattggtaggtaaaattttaccccctgacaggcaactgccaggggaatagtcaatactattgatacgtatatcaaagaaataatcacttttctcataatcaccaaaatgaaaaatttactttatttcaacccatcctctacttcaatgaataaattaagtgattcatctatttcaagatccacaaccttttgactctcgaaaagtcaaattgttcgtgccatcaaaccatgacagctgtaatatcatcttctgatgtagcaattcattttccatctttctgaacttcccaatagcaatatgtcattatacgattcccactatcaaattccataagaataattgagtaattacctccatcagaactactatatacgatgttacaacctatattcttttttaattcagtattaaaattcatattatctaaataaatcaattttcacatagctcctcgaataaaaggtaccccaacatgagtatatatatcgtttcatgtcagggtaacacttattaatgcaagaggccaatctatatcaaaatatctataattatttcatatttataatcttccttatttggaatactacaaaccagataataataataatcgtaaataaatgaggtataagttctgtaccataataccaataatcatcttgcatatctgagacatttttaaccatagtcccaaaaacaaaattaattaattgaaaaaataatgcacctaaacttagtagcactgcaactactctgaaaataattttcaatatgttattgtccataatttatttgtatatttggattttgtattaaccatgaatctaagattggcataagttgattccaagttataccattgttagcattccaaaaacttccactatcaatccaatctctatgcctatattgatacccttcattgcttttctttcttattttataattcgcattaggaatatctctgctaccatctattggaagacttaatccttgtacccaatcattagtaatcgtagcatcaatcaaaaatgttccaaccgagcccatcaattcagaaggcaaccatgtatttagatgaattgagaaatcaacattccaaccttgctcttttaaatatcgaataataccttctgaaaaagcacctcccatactatgagaaataattcggaatacatcctcttgtggattcatacccattatcaattgtttgtaattttctttagcatatgcatatccatctaaatttcttaaaaaggtagaactacgcaaatagttaaaatcaaagtcggtgaaataggcactttgatcattaaaaaagttttttgcacctttaacaaaagaactatttactcctccccaataagtgccacctcctctaggagatccaaaccctaaatacccattaacaaaaataatcttctgcccatcggggtcaatacaattatgtggtgtatttaatccatatacatacgaactaattgaataatacttctcactcatcggatcaaccgcatgccatctaccaagcgctgcatcatacatacgcgccccataatcataccaatcaagaccattcttcctatcaagttctttaccgttatacttacgaatgtttatctactaatgtactctctgcaaatgacacctcataaggataatagtgattagtccggacaactgttccatcaaactttgctaccacacggctattaccctgatgatcctgaagataaaaagaatactgcccatcttcaatatagccaacttcatttaaactgctgtaattctaatcccacttaaaaaaacgtcgtattctctcttctttatcataaacccctttattataaatataccttaccctttttgataaagaatctcttaagtcactcgaataaactgcatcattatgcattattctaaatttctgtgggatattattaatattcaagaagcaaaaagtcgaatcgctaaacagcttatacatagacatccaaatatccttatccggtaaattctgaagaaatgaatggggaggttcactatcatatttcaaggatttaaaatcatgaggggcaatagcaactggaagtgaatccctcaaaaccaattttaatgtatccggtccatttattacagcatagcacatactcctcgctgaattcctcgataatagcaaaacggaatcagtctgatttcttacaaatatttctcctgagaatctttctacataattcttcagactatcaatctcaagttcaaaaaggtccggaatatatgaactgggaacaataatatcgtgcgaagtcaatcccatcaatgcagttttctcctggggtatatctccagaaaaatacgaccaaagttccggatattcaaatagacgataataattaggcaacatctttactaagatatgtttatcttcatattttcgaagagccaacagccaatcacgacctctgtttaaacataaattttcatgaaagttagagtccgaaacaaaacctctctcaaacaattctgtgcgtgacatttcaggctcatctaattcgataaagcaaagatatctttctttatactttatcactctggaaggtaactcagcaccatcagaaccaggagaatctgattcaccgatataataaagtgaattagaatctgtcgaaaacacttcatctatttctatatatgtcgtaagtaaatagccactatctatcagcacttccacctgttttgctacacgctgatgaatatcttccaaagaaggggagggggatatgcatccccccagtataataaatagaacaacatagactaattttctcataagcatatcatttacgttttatatattgcaataaatctgtagcatcatatacacgaatagaatttacccgacttgcatttttggtatattcatatatcataccctttttatcagtactcacacggttatctttcatatacacagcattcttacgttgtggcttagctaagttaaaatcattaccagctccacctttcgttcctccgggcaaatgagaatgaatatctataactttttctcctttcacagaaagtttattttgagcatatacaccattatctaccccatatggatctcgatctgtcgcaacaacagctgttcttgtaccattatcatcataaacatctaacttccattcaacagttgtgtgatcagcagcaaatttaaaaacagtagcagctgtctccaaatcttgagtacttccataagatttcttcacccgattttccttctgctctttcgcctgcatactatgtatttccccaagtaacccctgatttacagttactgaaatagaacgatcactggaaagatataaattatctgttgagcctttacctctcttatcaataggagtctcattaaataatcttcctgatctgctgataacataatcatcctttccgtctaagtctatcctcaacacaggattgttcttacaataagtatacggactccaactataatacttctcactcatcggatcaaccgcatgccatctaccaagcgctgcatcatacatacacgccccataatcataccaatcaagaccattcttcctatccagctccttaccgttatactaataaggctgcacagcattacttaccgaacttgatagcagaccgccaaacggataataatggttcacttcttcaacattaccactctggtctacaaccacacggttattacccaaatgatcctggacaaaatagtgatacttagaatcggccagtgtaacatagccagcttctgtaagcaacttgacagggattccattttcatagatcacattgccgcaataatcagttactgtagtatcactccctatgatatgcgtcgtacgaagttttattccatcagcatcataaagataagaaatgacatgaccgttttcaaattctatgcgactcggtaaatttataaaattatattggatatcagccaacttttcactcaaataatatcacacagaaatgtacacaaacaaaatagaggatgtgataacacatcctctaaatattttcataaatttcaaatagacaactattatcagaataaatacactatcactattttgatttaggtagatattcatctatttcatctggatggtcacgtaagtattcttttataaaagacggtaaccattcataaggggtaagagaatcatataatacttcctgaataaacttttgaagttgctttggatttcccttcatcaacacgtcatttaaaagcactccgtaaccaccggcaccaatgcagacttttatatcaggcctcctttcaccgtttatcggttttaatcttataagtgaacttaccctaagatcgatataagaatcgggattggcaggtttcaactgattaaccagagtcaaaaagcgattgataatcttcctatcacgaataattgttttatggctatcatttccaaatacaatgtgcaaacaatcggtgataggaacatctgtatccacatctcctataaaccaaaaatttacattttccacttcgttactatcaattaaaaattgattgcttttacatgatgttataaacagtaatagcaaaaacaatgaaccaccataaaaacattttttatggttcagaagtccatacagctttattccttttctcatattcctgtgttttttgtctatcaatcacatttgaagtaacgcctttcgttattacagttttcccattatggtttcttcttgtaacttgaccggaacgggtttctccattagcccttgaggttttctgttcagaaccagttatcacccgcctttcttcttttgtctgatattgcgaatcgctacctcgtgctctatttacttcatactcttgagtatttgttttatgttccaaagcatgatctgcttcatggtcaaatacggtagccggagaattgactattccattatctttttgcgatccccagttactcttccaataaatacttccagccccacgtgcggcattgggattatatgagttctcaaacaccgcttccatcacatttacctttatattggtattctctacaattgctaccgtagaggctccacctccgtttcctgccttcaatccattcgctttattatattgataagcagtaattacagattgtacaaatgaatttggatgagttatgtcaccaccactatatgaatatgaaacctttttcccagcatcattattataccaaataactactgtatttccgtccgggtcaatatgatttatcggattacccatacaataagtatacggactccaactataatacttctcactcatcggatcaaccgcatgccatctacccaatgcagcatcatacatacgcgccccataatcataccaatcaagaccattcttcctatccagctccttaccgttatacttataaggctgcacagcattacttaccgaacttgatagcagaccgccaaacggataataatggttcacttcttcaacattaccactctggtctacaaccacacggttattacccaaatgatcctggacaaaatagtgatacttagaatcggccagtgtaacatagccaacttctgtaagcaacttgacagggattccattttcatagatcacattgccgcaataatcagttactgtagtatcactccctatgatatgcgtcgtacgaagttttattccatcagcatcataaagataagaaatgacatgaccgttttcaaattctatacgactcggtaaatttaaacaattatattggatattcaatattttcttgttcaaatctttcgtcatattaccattttcatcatattcatattcagcttctttgtttactccgtctttgaaatcaaagccattgccgtaaacagaatttgtagccctatctgatactgattttagttggttcccattataggacattgccagatcatctatcaagccgtatccggtagatgaagtctgtccggaacgtttgatccctaaaatattactcatcttatcgtatccggttacttgttcattgaagcgattctgattttgaacgagaacactgccttctccatacaccgcattcgtcaaacgattcaaattatcataagtaaagtggtagcctctcattatatcatcttcacccgatttccaaaccatactgctgatattaccattgtaatatggaatacccgttccgtccgtataatgcaatacttgctcaaaagatgaaccagtgataccagttagccaactacgaatattatacgaataagacgtattcaacagaccgttatggaacgtcttccgggataagcgtcccaaatcatcatacacattgtcaataagaatcacttcctgagcatctcccaaacgatgcagcgcctttacaagacgttcggcgtgatcatactcataggtataactgtcactcaaaatctcatttccagccccggtctgacggtgtaaatgccgcaaggcgttcccattaaaatcataggaaaagaaatcacggtccataccacctaaatggttgtcagaaacagtttgagaaaggcgaccacgatcatcataatacatcactgagtaattgtagggagaatccactccatattcaccattacgatactgatcgtatgcatccgtatgcaacttagctattcctgtcaacattcctttagcactggatgacgtagcggcaaaaccttcttcatgggtatatctaaattcatctcttgccgaaagatctgtccgatacataaagtcatagttatcataataattgattacctgaactaatggtttcggccccactaatcctgccataagacttccactaaactgataccccccatattcagtacttcctacgtattgacaaacataccaattcgacaatccactaaaaataggttttaaataaggattatcaaacggatcaatcgcaactttacatactccctgcaagcatacacgaccgaatgcatccggaatactaaatttccattctcctcttttacgttcctcgccattctggctaaatataagattgttgtttacattatagacatagtattcccatgaaattcctggaagctttttagccatgaggtttcccgccacatcatatttatacaaatatccatacatatcgagtttttctgcaggaatattacctacactcaactgatcggacaatgcaggaggaagaacagcacaaagttttcccaaatcatcataaatatagtaagtatccgacaattgcttatcccctttcagtcttgattctatacgacgttccagaacggttctttccaaacggtctttaaattcaaacaaagtgactccatcttcatcctctgagcgtgtaacaagcaagcttccattttcatactgtttacttacactaatatttaatgcttctcttgccccattgatcaattgaaaaccgaaacaacctaaagtatcattaccagcgatattaacgtactcatctattttcaatgatctgccattttcacgccatactctccccggattatgctgtttaattactttttccaaaggagaattttcgtaggtaaaggttaaatacggataagcatctcctccataagtattgcgtgccaattctccacaagaagctacagatatgaaatcacctgtgttttgtgtcgttacagctggcaaccatgtattggctttacgcccccacccatcatattcttgtagggttactaaatctttatgactaggactcacaccttgttgtaccgtttctttcgaacgccccagcccatcatagtaattaaccacaagcataccttcttccttatttcctgtcctactcttgaaaacagaacagcatttttgccaaaacgttcgggcaatagatcatttccccaatttattgcaggaaaaggaatagccggcatcggctgttcttccggagcaagtccttttgtctctattgacagagtcatgatataaaataaaggaagtggtcgaattgagtccatcggcaagaccggatctattggcggaaaaggatcaatcggcggaaaaggctttattggttcatgcgggtcgatcggtttaatatcaaaagtattagttttcaatacacttgcagcattcacaccattatcatcaggaacaagaatatctttgttcttttctattacagtcgatgtcaaacaatatgtaccggcaaataacaaaagagtatcagtgaaactcactgatgataaagaatccggatcaacacttttcgcattctgataatacacctgattagtgagcaaattatcatctgttatttttaattgacattccaattgtcccggaactttctccatttccattcccatagtgaaataattagacttaaaagaaatatataatggttctttcacacgaaacaagtagtttgcgcaactcactgacgatgtatcagaaatgtttatatggtccagatgttttgttttaaccatatccctcttcaacgtgtcatattcgagcttacctatctcattctgcaaagaattctgcgcaggtatttctatcgaaaatcctgatagcaaaattagaagtaatattattttatgcaatttcatagttgtcctcctttctctatggctacttctccactttcaatcttggagccataataataattgtaatcatatatatttaatatccgtttttgataatctccatctttaaattccataatataattctctgtcaggcgacccagaaaatcatatttataaaacacagtgattccattaggctttgtttctgagaccaaacgcaactcatttgtatatttgtaaatatagaaatgcgttccggatatcttatgcctgatattttctatttttagcaaattagttgcagagatatcggatgaagagaaatccttcacattcattcccaatgcttcttccacttgattaagagtggcattttctatccgtgatattaaccgttgaccttcagctccccatatcaatacaacgggcgttgactcttcgtgaagatatataggattcccataaccatccacagcctgcacagtgtaatgtttatgcacataaccatctctatctgtactaatctgctttatataaggtataggacccatatactgatatacctcttttaaataagagccgcctgtctgttcttttttactagaaaccggagatagtatatgtgcttcttccatccatttatattccggtaaagttgcagcataaacatattctgtcagagtactttttccatcgctgtttctaccggctatttggcttaactgcttatacttattatattgatacgccttttctataacaaatgccgtatttcccgattgaggataaagagtttctataacagagtcggtcagataagcatgtgtatatgtacgagttaaagtccccacttttcctagcatgaaattgtctaaatctgtacaaaagaacaacaccatttgatcagctgttacaaatgagcctggagttacctctttgtatcggtaattcaccttctttcgcaaacgatcattgacatcatagtattcttcagacaacaactttcctctctccatagaacgactgctaaatggcattgtataagagttcccttcaaacatagaataaaaagcaagctcgtcataatgagtattaccataaatatcctcattatagttagagtaatgacgcacaatataaccttgcgacttattatctttgtcgaacgcttcttcaattacacaagaataacctacatccggtgtattcagattagtaactgatgggaaaaaacctccctttgatttgagatataacgatattgcattcttaggatcaggctccttatctccatccttaagagtatacaccatctcattaacaggaagacttttcaatattccactactttttccaaatcggtcacgggtattcgaatagtaatattgcttggcaccaagcacattatcttcattatccagattggtaatacgccgaatacgcaaaccgcctgcagtaccacttttgtctgttaatgacatcaaagaaggagctaccacttttgaatagttgttcaattcatattcaaaacggctttttccacctgttggataaatgacttccgtcaagacctctgccaaagtatattgcaaactactataagtctgagaaaaattaggtatctcggcaaaagcaacacttcctcctgtataatatccccacgaatcggcaatcgggcgtacataatcatttggcatacgtttttccgaattataaagaaaacgatattcaggtacgcgacctccggtcaaattctcaggtatattataccaagtaagaaaataaaatccatgtgggtgccatacatagttagggatcaaatccggattccctgaacgttccgtaattaaagacaatttagtacgattattccttgcatagtcaaaatatatagttttcaaagccttggagttctttcctttcacataaatacaatgaagaattttatgttgtagttttgatttaatcgattgacgcaatgttgcctgatcggtattatcaatttggtttcctaaaaacagagtaaattgattagccgggtcttcaaaattcatgttatctatatcctgacggtcataatttgcattgtctttccatgccaaataactatcaacaaacttatctccatatccgtattcattgtaataattgaattccaatatctcgttaggtgtttttatagtctttaaattaactgggaaaagcagatacccagtcatccctgaacgcccactttgtataccactataagtgcatggtatgttggtcaccactttctgttggggtacataacgaagatcacacatgatagctgaagtgtcataactgaattctattacccgcttgtctacggttgttattttggacaacctccaggtagtagctattaaatcactgttatagcgggcataataaggaatactatattcagtagcgttgattccaccaaattcatacctgcatccatcaggagtaatcagcgtaaatttattgaaaaaacgattgtttcttgtgcttgctccccatctacttacatcaagacgttttccgacttccgacaaactaagaaagccttccccatcaacaggattaaattccacacgtatatcctgatcagaaacaacattccactctccattaccggcatagtagaaatttccagaataaccacaaacactaaacgaaaattcgtcagcagttaattcataataatcattttccgtgctttgtatatgcatcgtttctgctttaaactgttcattactgatatttttcaatttagaagcatgtgcataataacccggagcatatccatttgattgacatttctcatcatacattccacgaacagaacgtgtaatatagccgcctgctataagattccatccaagtccaagacaaccagactgggaattaggctttaccgaagccaaatgataacttgcagcaagtgataacgaatagttaccagctttcaattcataaataggcacggatatatccggaactcccgtatataaactaactggaacttttccatattctcccaaaccggctatttccggactgggtacatttttaataggtatttgttgctgacctatacagttgaaactgaatattgccagaaaaacaaatactgatagtagtctttttttcatattctttgatatataatagtttcttaaataaaatcacaatactaagaaactccctgcccgataaagtagcgcgcatattcccatgacagggagttcccgttaattacttctcttacagattcatcgcattagcacccaatacgcctgccacagccgacgctaccgcgataaccaccttcaggatcatatcccatacagatctcttcattgccatcatttacctcctttcttgttctgtaaatagtttagtttactctgtgtttcttccgtgtcttctgccgcaaattctttaaattcctgctcggcatcaaagcacggacacgccttcatccactcttccggttctatctctccattaccgttcctgtccggcgagagatcccgatgcccgcacacccggcagccggggaatacctccagcagctgatgaatcagcagccgaagcgtagcacgctgttccggcgtccgggtgtctgccgggcgtccccgacagtccagaccgccttcatagcagattccgatactgctggcattaaaaccttttgcgtgtgcaccgatgcgttcgacagggcgggtaagatgcaccgttccgtctttgcggatgtagtagtgatagcctgttccgttgaaaccacggcggcggtgcatcaggtccaaagcctccggagaaagcgtacgattcccctgcgtggcggtacaatgcaccacgatcaaattgataattctcatgtgaataagtgattactagttagttaagtttccgatttagtttagtcgttcgttcttatattttgtgttgtgacgaaaggttatactgtcgggtccggtgcttcctcaccacctccttcgccaccatcgccgccacccggcttatttgtatttccactgccggaagccggagtgtctgtacggtcgaagcgcacacacttcgcaccggtcaccaaagagcgggtagcggtagtccgatcggggttcttggtgaagttgggaaggaaacggaccgtaagagaagcttgcgcagccgacacttcttccgaagtctccacccctttaccgttggatttcatcaccatgcggaaagtcccgaaaccgtcaagcgacacgctttccgatgcttgtagatgctgccccatcacagtcaccaggttatcaagcgtattcttcacatcacccggggagagagacgagtaagcggcaatctctttagcaatctgcgaagtgctgatattagccgtgtatatcacacggggatgaaacatttttttgtgatttttgtcttccagaacagactggaatgacttgtacaatactgccataatcgtaatagtttttttgtgttaataatttcgtttagttttgtcctcaagcttaatgacattgcaaagataggagcattattcagactgacctaatcattttttcaaagtgcgttcataaattaattaattatactcagcaggtagtgcccgggcaatctgatctttccattgctcccccggatggtattaaatcctttccaaacagggtttccaatagctccgaagttacttttaagaataatggcatattgttcggaaggcggaactttgtaaagccgcaggttatctgtcagtccctggaagttacgctgcacaccatcgcatggcggttgcagacagtcaatatcttcctgtgtcacagccgttctacttttcaaatattttcctccttcatctcctccttgaggagggttagggaggtggtttactttgttttgatttatttttatttgttttcttttgttttgtgtacccgatgttgcaatttcatcctccattgttacagaatcggagcttgatgttaccgtacaggcggtcttgtgatcagcatcaccgtttaacgcttccgcacattcgctatccaaagaatcatccgtactacttttaccgctctgagacgaacggtatgaggtgatttcttccgattccagcaggcagtagtccggctctatcagcgcactgctacgccgcttggtgatgaaaagatactgccgctggatgtcggcggaagtcaggatgttgtattgccggaaaagtccgacatcaaacaagccatattccacggacagactgatgatacgcttcacatcatccagttccgtactgtaaaggctgtccacaagctcctcgtaaaattcgtcaccgacagagatataataccctttcccggcatagatgtacgacagcgtttccaccagtgtggcaaaggcagaatcaccttcacgtctcataattcggcgcaccatccgatcgtgcataaagctggtgctcatggggaaataatccagtccccgttttattcttcccatagcatattcagtttttctttttcttgtttccgtgagatactttctgccacaacctgacgggcatgaagaataagaagcatccgcaaagcggggtctttcacctcggttatcaccggataagaaacaggtttgttttcaaatgatgtacatcgtctcaaatcacgacgcttgcgggtgtttgccttgcgacactccttgcaataattgtcaagggtcccggtgcgtttgtttgtataaaaggcctcatgcggtagctcccgtttgcagcacccgcaaatgtgcagagattgattcattaaaggttccatattgattttgcgttttaaagttttcatgcttaaatatttgtttatgtgattatcggacatatagttcctgcatattggggatatatggccagcgtattggatctatagctcctgtatgcaggatatatagatgctgtaaaccgactcaatatcactggtgttcatccgatacagaatcttccggaagggggtggatgaggcattttacaacctttcataaactttttgccgtttttcatggttattctatttttaatttatatttttgaaacatatttctaagtttgctgctacaaagataaagcagttttctcacataaaacaaacggttttagaaattaacgctaaaaaattatataactgactatcaatgaacgaataagaagttccaacatctttacactaatttaaaacaagaataaaatggatacatttctagatgtttcgggaatagtaaagcgcgccaagcaggcgctcaactttaaaaaggacagtgaactggccagttacttaggtgtttcacgtgcaacattatccaactggtgcgccagaaaccggattgactttcatctgctgctcaacaaaatgagagatgtagacctcaattggctgctggttgggaagggtacccccagacatcaaaccaagttatgcaaaagcgatttagcaagcggtgaggtccagatgattcacaaccctaaaacagtagaggcgttggacgaccgcagcgttgccctatatgatattacagctgccgccaatctgaaaacgttgctcaccaacaagcgacagtatatggtaggaaagatacagattccaagcattcccttatgtgacggagccgtctacatcagtggcgacagcatgtatccgatactgaaatcgggagacatcgtaggctttaaagagattaacagtttcagcaaccttatttacggcgaaatgtatctggtttcgtttactatcgaaggagacgagtacctggcggtgaagtatgtgaaccgctcggaaaaggaaggatgcctcaagctggtaagctacaacgctcatcacgacccaatggatatccctttcagcaccatcaatgcaatggcaatcgtgaaattctccatccgcagacacatgatgatgtaatttgaatgacgcttcttttgctccggaaagaggaaaagggcaaagtttaaacgaagtgaaccccgaaagtttattgtctgactttcggggttcatttcattttgaaataccttctttaatatattgcatgggctgactaaaaagtcggcagtatctcaaatctcctccttcgggaaggaggggaatttatgatactatcgatttttaatcagtcccgacatcgagaataatatactagacttcttcgcctttcagcgtagccgaactggcttccgtcacccgcacattgacaaaatcgccgatacggtgcgtgcctctgtcgaacaccaccacccgattctgctccgtgcggccgaacaactgatcgcgcgaacgtttggaaacgccttctacaagcacttcatacgtcttgccgatgcaacgttgattggactccgcggacagacggttctgcaaagcgataatctcattcagacggcgaactttcacgtcttcgggcacattatcttcaagatgcttcgacgcatacgtccccggacgttcggaatatttgaacataaaagcggcatcatagccacattcctccatcagagaaagcgagagctgatggtcctcttccgtttcggaatggaaaccggagaagatatcggtagtcagtccgcaatcgggaatgatacgcttgatagcggctacccggtccagataccactcacgggtatatttgcggttcatcagtttcaagatgcgggagctgccgctctgcacagggaggtggatatgcttgcacacattcggcacttgggcgatcacttccagcgtttcatcgctcatatccttcggatgggaagtcgtgaaacggatgcgcacgcccggagcagcttcggccaccgtacggagcagcatcgggaaggtaaccacttcgcccgtcggcttctcgaaccggtaagagttgacattctgccccagcagggtaacttccttataacctttggcaacaaggtcggccacttcattcagaatactttccacatcacggctgcgttcgcgtccgcgtgtataaggcacgatacagtaggtgcagaagttattgcatccgcgcatgatggatacaaatccggaaatgtggttgccgcagatacgcgacggaatcacatcacggtaagtctcggttgtcgaaaggtctacgttgatcgctttctcgccggcctctaccgcggcaatcagctcaggcaacgtcaggtaagcatccggaccgaccaccagatcgacatgatggttcgtaatcagatcatccttcacccgttccgccatacagcccagtacacctacaatcagggccttcttctttttcttcagcgagtggaaaaactccaggcggttcagaatcttctgctccgcattgtcacggatagagcaggtattcataaacactgcgtcggcctcttccagcgtttcggctaccgaatagcccgccatctgcatcaccgaagcgatcacctcactgtccgccacgttcatctggcagccataagtctcgataaacaacttcttgttgtcatcagcagttgcggatttaaagtccgctcccgttaattcgttcatattcaaatcttgttttaaatttatccgcaaagatacggcttcgaattcaataagcggtaaaatggtacgaaaataacgcaaaaacttgtagttcaggcattattctgataattaatgttaatgaaataaacatttacggggcatatccttgctaaatttaattttatttttcacatttgtgcaatgaaagaaacattagattttttcatagttaaggtttaggttaaaaaaattaaggggagctgtgaagctgcccttttttcataacaaaatgttagctcaaaccagatataatgtgtaactttggcagattaactatttagaagtgaaacagaatggaagattttttgaaatttctcctgatagcaggtgtcattcttgtgggaatattcaaagaggtgagcaagaacaacaagtcgaaaaaggctcagaataaacgccccgtcccgcctgcaccgtctccggtcgaagtagatcctgatgctattcccatacccgaattctgggggagaggcagcaggactatggacgaactgctccagcccatacccatagaacaaccggctcccaagccgacgccgacatcaaagaagatgccgacaccggcgccaaagaaaaagcaaaaagaagaagtatctgtagctgcctccatagcaaacagttccgcacaagataaacgaaacgcgaagcaaggttcccactataaccatccggaacctgacagcgaccaagacttctccatccattccgtagaagaagcccgccgcgctattatttggggagaaatcctacagcgaaagtattaagcgataagtattaaccaacaaatatcaaccgcatttaacgcgaaattatactatttatgtcattcaatcgtatttcggcagcagaagctgcaagcctgatcaaacatggctacaacatcggtctgagcggatttactcccgccggaactgcaaaggctgttacagctgaacttgcaaaaattgcagaagcggaacatgccaaaggcaacccatttcaagtaggaatttttacaggtgcttctaccggagaatcttgcgacggcgtcatgtctcgtgcaaaggccatccgctaccgcgccccttataccaccaactccgacttccgcaaagctgtgaataacggtgaaattgcctacaacgacatccatctgtcacaaatggcacaggaagtgcgttatggcttcatgggcaaagtgaacgtagccatcatcgaagcctgcgaagtgactccggacggaaagatttatctgaccgctgccggtggtatttctccgactatctgccgcctggcggatcagatcatcgttgagttgaacaccgcacacagcaaatcctgcatgggtctgcacgacgtgtacgaaccgctcgacccgccttaccgccgcgaaatccccatctacaagccaagtgaccgcatcggattgccttatattcaggtagacccgaaaaagatcgtaggcgtagtggaaaccaactggccggacgaagcacgctcttttgccgctgctgatccgttgactgacaagatcggtcagaacgttgccgacttcctcgctgccgacatgaagcgtggcatcattccgtctactttccttccgctgcaatcaggcgtaggaaatatcgctaacgccgtactcggtgcactgggacgtgacaagacgattcccgcattcgaaatgtacaccgaagttatccagaactccgtcatcggtctgatccgtgaaggacgcatcaaattcggtagtgcctgctcactgactgttaccaacgactgcctggaaggtatttacaacgatatggatttcttccgcgacaagctggttctccgcccgtcggaaatctcaaacaatccggaagtggttcgccgactgggtattatctctatcaatacagctatcgaagtggacttgtacggtaacgtaaactctactcatatcggtggaacgaagatgatgaacggtatcggtggttcgggagacttcacccgcaatgcttatatctctatcttcacttgtccgtctgttgccaaagaaggtaagatcagtgctatcgtcccgatggtttctcatctcgaccacagcgaacactccgtgaatatcattatcaccgagcaaggtgtagccgacctgcgtggcaagagcccgaaggaacgtgcagaagccatcatcgaaaactgtgcgcatcccgactacaaacagcttctctgggattatctcaaactggccggtggcaaagcacagactccacacgctatccaggccgcactcggtatgcacgccgaactggccaagagcggggatatgaagaatacgaattgggcggagtatgccagataaggcatgaaacgtctgtcgttcatactatcattcatcgtttgtatttgcgttgcaaatacaaacgatgttttttcgcaaaaaagggaactgcaacagttcaagggcaaggtgaccaaccaagaaggagaaccggtaccctatgtcagcatctatgttccgggaactggcagagaaacctcttcggatatgtctggaaacttttctataaaagccaaacataaagaaactgtttacttcagatatataggaatgaaagatgtgcagatacaactggataaagataatccgtcggaaattcttgtgcagataaagccggatacttttcgccttgataacgttatcattaggaaaaagcaaattatcgaagttaaacccgaagatatacctaatgatattatgatcactattatagaacatagtcccgactttccgggcggattaagcggactaagggagtatctgaagaaaagcatacagtatccgaaaaaagctttccgggcaggggaagaaggtcaagtcacaatagaattcaccatcgacccaaaagggaatgtaatcaatgcacaagttgtaaagagcgtatctgccaaattagacaaagaagccttacgcatcatagagtccatgccgcaatggaaaccgggtatgcagcgaggccgtcctgtagcagtgcgcatgtctgtcccaatagacttcgtgatcgatcaagtctacaaagccattgattgaggggaaataaaccgaaagcctctcgtcagaggttcagcactcatttacatggaatagtcgccaacatatggaacggatagttactctccgcaacagtcattccgtttgccgcatagcactcgctatccgggtctggtaaagtcattgcctgctgtaaaagagcagaagatataaagtcagactccgatcgttctgatatcgcttcgctctgtctcgcatgctttttcggagaagcagacttcgactttgctgcatttgaagtagctaccaaagacttcagatgaacttcccgataaacagtatctacccgttcatggataacaactaccgtatcaatgactgtagtgacaacggcaatctgatcagattgcgtattacttccacccgggaagccatatccgatggtccatcccagcagacaggcagctgtcagccaccagggagaaaccttcagtctcatcctcttcttttgattcttccgaacagcttgcattaaagaagaaaaatcagccggagtatgctccgatttttcctgttcgtattgttctttagcaaagtgaatcaactgctgcacatcctgtgacttttccagtctctctaaatcatcatttttcattttcagttgtttttggggttatagttagacaaagaacgctgtaatattttaagtgtatagtataaacgagacttcactgtaccttccggacaatgaagaatctgcgcaatttcccgtaccgaaagctcttcctcatatcgaagtgtatatgcagccctttgttcgctcgtcaggctggcaagtactttcttcaactgctcattaaagattctacggtcatgcatgctctcaaactccggcgaaacacagtaatccttttctaacggatgagactgttgtgaaaaatattcctcctctatttcacggtgccggtattcattcttacaaaaattatatgcaatggcaaaagcccatgtggagaattgctttccagtctgataactactccgtgcttcataaatgcggagaaataactcttgtaaaaagtcatctgccaacgcaacgtctccggacatcatacggatgaaaaaacctttaagccggggagcgtagcgacgataaagttcctcaaatgccttctcgctcttcttggaaacaaagcgttccatgagctgctcgtccgtctcagtgtatgtcaaagaactgaatagcatcatagtccactccatctattagtttctgatattcttttctcatatccttcccctgcttaaaaggtccacctttcttgcgcatctcatcgatataggcaaaaatcgcatccatcagctttacatatttattcatctccacatttgcgatccttctgggggtagtcgaataatccagaatactttgtaataagctctttaatcttatgtattggtttttatctccactcatttgataaaatcgtaataaaggagagaaagcgatgatataattacctagaatatgaataccacttgaaaaatgagactgatcctctatcaacgggtggcgcaaatagtccagcagataattctgctcaaaattctttctcgtagccgccagattattgtatggtttagacgaataccgaaataccagcccctccgaatagaggctgtctttcatctcttccaataaatctctgcggtagaaaaaatgcgtataatacacaggacgtttctctttttcggcaaaataccacaatccaggacatctcaccgtctttgcatccggaagcgtttgcacatctattcccacttcctgccataactgactctcctgagtaggattcctcaagtcggcaacatcgaccaccttcacatccgtaaagagtccgatgccgtattgcaatagatagcggtaataggtaccaagattcaagtcagagacaagtatggcgtctttctttaaaccggaacactcattataaaaatagaatagaaaggcatgggaaaacaatccgctgtcataccattcacgggcaagctcctttatcttgtccatatcttttttatggtgataataggtcagatcagagatatagtcgcgttcactggtacgcttgatagagagtatcttttgttgaattacttcccgttttccctcatcggtttccaaatccagcaaatgccgatagtaagtccgtgtatcaggaatccacttcttcattttcttcacgatgccatgttgttcccttcgcaatctttgcacctgcagagaatccttccaccacactaactttgcctcttgatattcagcattacaagcaacccaataattctcccatgccttttcattccgcttatctttctttaactcaacctgccaggcatccttctgcgcccgataccaatctgcccccaaaggaaagaaaccatccaacaaccggacttccaaaggttctgctttctgttcctgggcaaatacggtatgtccaagcactacgaaaaggagtaacatataaataagtcgtttcatgcttttctgagtttattgaagattgatgcttttctgatattgctcccgcacctccttactaaaagattttgcattgtcaatgacagatttcagtaacaagtatagtttgtcataatgattcaagtctcctgattctttgtaaaactgtaacagagctttcaaagcaggtacataataaagactcaatgcttccgtcaattggggattaaaagctacagtcgccactgtctccggataaaaagtctcacgcaggtaatccatcaaatatacattctcaaaattccgccgcacgatcgctagattatcataagatttaggagaatatttcatcaataatccctcggagtgcaggcaatccttaaacgcacttctggaaagttcatccatcgtaatagaaaaatatacgggacggtttgtatgccggataatgtaatctacctgtctcttgattttcttggaatacgttttcataaaatctgtaggggagataaatccagtcgtatcattattttcttctttatatttagggattcccagttcttcggtcagtttatccatatacgtaaagctagacaagaaaggatacacaataatcttcttatcattaaacatatctttcgcattctgaagcattctggcaccgtataagtcaaggcttccacccataaagatgatagcatccttatctgccgaagccagctcgttataggcaaaattgagtatctgcgcaggaaattcaccggattgataccaacgtacacatatatctttgagccgctcctcatctcttaatgacatagacatgtaagtaggataatgcaaaatagcatcaggccatttgtctataatttcttcgattggcattctcttttcacccggcttaatgttcatattccgcataacttcatacgtagcggtattagggatgctttgcttcatttctgccatcatttcatcaaactctttctgtatatctgccccaacagcaagtgtagcagatggtttcatcgaaagcaataaggatattccttttagtgactggagtttccctgcatactgcatccatgctttttcgtctttagggttttcctttactttctgtttccattggtctatctgctcacgcaaggaatttgcaaccatttcaatagagtcggaagacaactcagcatcataataagtagattcaacttgcgaatacaacagtgtagcacaagaacaaaacaggataaacaacagatatttgatcgttttcattattcactcttttattaaattcaacattgcttaattagaaccgttctgacaaagcatacacgcaagcaaagcaaacgttcaaataaaagagtacttttttttgcaggtgtttactatttgcatccacaacgggttcaacgtcccgtccaataatctattcatcactccattcaaagtccgataatcacctcacaaaccttatcctgaaacgccctcgccctggctgccgaaagcacattctgattcataatggcaaaagccacttcatgtccattcttcatcttcagataaccggcaagggcattgatagctgtaaacgaaccggtctttgcatggacatttctgaatgcggaagtattcttcattctgtttttcagcgttccgtctattccggcaacaggaagcgacttatacaatttctgaaaaacatcggattgtgaataggcatatttcagaaaatcgaccaacagggcaggagacaagtaattataattagacaatccgcaaccatccgcgatcttatagtctttcggatcgtgcccgaggttacgaaccagtttcataatctcaacaatgccatcttctgccgtcacacgcttcttccctgtagcttgtgacgcaatccggcaaagcattgcttccgcattcaagttatcactttccttcatcaactgattcaagaccttctgcaccggagtctcccagcgagccatctgctctgctccatcggacggtaattcagtaaaaccgtacgattcgggaaccacgattcctttcgcacggaggcgttcccaaaaagtatgcataaagaaactccctgaatcatagatgtttatcaaatcctttctaaacgtaggaacattgcctgtcacgatcagattattcccattggtcaaccaatctcttgataacaaatactttccggcagaaggagtacgtgtctttgtccggttcgtcaaggtataataagaagacacaggcttacaggaaacgcttgccgtatctccttgcagagagccgggaaccaccgtcacctccacagcacccttacaaaacatcaacggagacatataaggctgataagcctccggagtatcatcccatgcccatccgtgcccccaataaagggaatctttcatcgaaacatcgccatacacctgtccgttgatcaccgaaaaagggaaggtgattacttcttcgatcaatgaatccatcatcaaactgtcaaattccggatcgaatccaccgacaacatacaagttgccttgcagcgtatcatgctctatcaccccgtcgtgccatacttccgtacggaaaggattgtccgcatcgggacgggagagggctgtaatagccgtgagcagcttcatggtagaagccgggcgggagagtttcgtatcacgataagtatataatgacttcttcgctgtcaggtcatacacggatatgccgacttcggatgcttcgggaagcattcttttgattagtgaatcaatctgagaaagatttgcctgcccccatacggatgtgggcaacagggcaactgataaaaccaaaaacaacaaatacttcttcatcaaccttctacattaacctacattaactttcatgctacttcagcttcttccgtatctcgaatatcacggctatccgcttatgctcaatcttataatgcttcccggaaaatctctcctaccgtaggatgagggaaaacaaccttcttccatgcggcggcagtcaatccaagctcaatggcagtaccggcaagagtgatgatttccgaagcaggattgcccagcacgtgtgctccgattatccgttcctgttcatccagcagtactttgcagaccccgttcacgccttcattctccgccacaaaacgaccggaataagccatcggaagtttcaccaccttataagtaattccttttgctgaggccgattcttccgtctctccgactcctgcaatctccggattcgtataaacaacgccggggatagcccggtaactcattgcatcttccttacccaaaatagaatgtacggcaacctcagcctcacggacagccgtatgagccaacaaagaaaagcctgtcagatcaccgcagacataaacgccggacagcgaagtctgcatcttctcattgaccttgatagcgccacgcccggttttatccagattcagattttcgagtccgaaacctttcgtcacaggtcggcgtccaacgctcatcaatagcttttctgctataacactgccctttccttctgcattctcgtatgaaacaaccgcaccctcttccgtctgtgataaagcgacaactttagtgctgagcaggaatttaatgccccgcttcgcatattcggcacgaagcaatgcagacagttccttatccattcctcccaaaatctcatccatcatctcaatcaccgttacctgcacaccgagactattaaaaaatgatgcaaactccataccgatcactccaccgcctacaatggcaagggaggcaggcagctccttactgtccagcgcatcccgatgcgtccagtaattcaccgtttccacgccggtaataggagggatgaaggtttcggagcctgtacaaaggatcagattttccgcattgtatgtttcttcgccacagcgaactgtatttttatctatgatctgcgcctctcccgtcaccatcgcgacattattggaggtcaactttgcctttacacccaataccagtttgcgcaccactttacttttacgggcaatgatcttcggcaagtcaaaagagacttcggagacattcaccgcatatttcgaggaatgacgtgcactgtcgtaagtctttgccgaatacaacagcgttttcgtcgggatgcatccttcattcaggcagacacctcccaaattattcttctcgataaggagtacactcaaaccggctttgccggcagcttcggcggctgtatatcctgcgggaccgccaccgatgataatgacttggtatttcataggtataaaatttattgttccattctctttttaatcaactccacaaattcacgttccttgacaggcatcaccgaagcaaactttccgtttccatactctatcaagacataattcgtcaccgaaaactttccgaatttcatggaatgatacttccggatagctgtgatttcggcaataggaattacttttttacgcataaaacgtccagtggatatctccagaactccatcagtagatacagtgtaaaccgtatgaataatctgttcgatgactacaataagcaggagcattagtagcactgccggcaagatatatttacaccacaaagcgcccacggcatttacagtaagcaccaccagcagaaaatactggtaccaggcgatgcgggcatgaaaaattcgattcattttgtcagatttttgcgtgcaaggtagcaaatttatgaattagtgacaacgaaaagaacaacgaagtgacttattttgtagctttgcggtgagaaataaacaaaattatggtaagaaaattcgatttcctcgttatcggctccggaattgccggtatgagttttgcgctcaaagtggcgcacaaaggtaaagttgctcttatctgtaaaagcgggctggaagaagccaatacgtacttcgcacaaggaggagtggcgtccgtcaccaacctgctggtggataatttcgacaaacacattgaagacacgatgattgccggcgactggatcagtgaccgtggcgcagtagaaaaagtagtgcgcgaagcgcctgcgcaaattgaagaactgatcaaatggggcgtggacttcgacaaaaacgagaaaggcgaatttgacttgcaccgcgagggaggacactccgagttccgcattcttcaccataaagataatacgggagcagagattcaggacagcctgatcaaagccgtgcaaaggcatccgaacatcgaggtgatcgaaaaccagtttgccgttgaaatactgacccaacatcatctgggagtaactgttacccgccagacaccggacatcaaatgctacggtgcctacatcctcgacccgaaaaccggaaaagtagatacctacctcgccaaagtgactcttatggccaccggtggagtaggagctgtttataaaacgaccaccaatccgctagtcgctaccggagacggtatcgccatggtctaccgtgccaaaggtacagtgaaggatatggagtttgtgcaattccaccccaccgccctgtaccatccgggcgaccgcccttcgttcctgattacggaagcgatgcgtggctacggtggcgtactccgcacaatggacggcaaggagttcatgcaaaaatacgatccccgtctttcactcgctccgcgcgatatcgtagcccgtgctattgacaacgaaatgaaaaatcggggtgatgaccatgtttatcttgacgtcacccacaaagacccggaagagacaaagaagcactttcccaatatttacgagaaatgcctcagcttgggcatcgacatcaccaaagattacattccggtagctccggcagcccactatctttgcggcggtatccttgtagacctgaacggacagtcttctatcgaacgcctctacgcagtgggagagtgctcctgcaccggtcttcacggcggtaaccgcctggcttccaactcactgatcgaagctgtcgtatatgccgacgctgccgccaagcatagcctgagagttgtagaccagtatgcctacaacgaagctatccccgaatggaacgacgagggaacccgctcaccggaagagatggtactgatcacgcaaagcatgaaggaagtcaaccaaattatgagtacttatgtaggtattgtccgcagtgaccttcgcctgaaacgtgcctgggaccgactggatatcatttacgaagaaactgaaagcctgttcaaacgcagcgtagcctccagagagatttgcgaattgcgtaatatggtcaacgtaggatatctgattatgcgtcaggcgatggaacgcaaagaaagccgcggattgcattatacgattgattatccacacgctaaaaaataatcatgaaaacattaactagactatttattcttttattcgttatggcaggtgtaagttcctgctatacagggatcccattgaagcaaggcaaatcggaaaacaaccgaacttacgaagtcagctatttgttcgagcatgacggagtcaaagtctatcgttttatggatatgggaaactatgtgtactttacaacaaaaggagatgtgatcagtatcaaaaatgactctacgaaagaaaggactgtaacgatctacagagacgataagttcagataaaaatatgtcttaataaataaaatggcgcttgcatatgattgcaagcgccatttttattatctaataaacacctcttattaatagttttctttcttaacctcgaaatacgcctgcggatgcaaacatgccgggcaaacttcaggagcttccttaccgatttcgatataaccgcagttacggcattgccataccacttcgccttctttagcgaatacggtcatattttcgatgttgttcatgaaagccaggtatctttcttcgtggcctttctcggcgattgagatattgcggtacatagcggcaatcatcgggaaaccttcctgttctgccacatcagcgaaatgaggataatccagtgaccattcttcatgttcgccggcagcggcagcgcgaagattttcgagtgtattaccgatcacaccggccggatagctggcagtaatttctaccataccaccttccaggaacttgaacatacgtttagcgtgttccttttcctgatcagctgtttctgtgaagattgctgaaatttgttcgtaaccttccttctttgcaacacttgcaaaataagtgtaacgcattcttgcctgtgattctcctgcaaatgaagtcagcagattcttctctgtctgggttcctttaatgcttttagtcataattctaatctattttaaaattggttattaccaaacgtaacttgtcgtactatttataacgcaaatataagcgatttgttcgtaataagctcccttttcttaatgaataaaaactatcgattcatagataaaacctatcaacaatcaaatagcatgttgctaaacatacttatctcgattattttgcgtaattttgcaacctctactttgcaaaagagcaaattatatataataattcacagaaatgaagttatttgaatttaaacccaaattggtttcttgtttaaagaattattcgaaagaaacgtttatggcggacctgatggcaggcgtcattgtcggtatcgtagcacttccactggccatcgccttcggtattgcttcgggagtatcgcccgagaaaggtattatcaccgctattattgccggattcatcatctctctgctgggaggaagcaaagtccagatcggcggaccgacaggagctttcattgtgatcatctacggcatcatccagcaatatggcgaagccggactgattgtggcgacgcttatggcaggtgttctccttatattattaggagtgttcaagctcggagccgttatcaagtttattccgtatcccattatcgtcggtttcaccagcggtattgccgttaccatttttactacgcagattgccgatatcttcggactgtccttcggaggtgaaaaggtaccgggggactttgtcgggaaatggatgatttatttccgtcatttcgataccgtgaattggtggaataccatcgtaagtattgtcagcatcattatcattgcaatcactccccggttttctaaaaaaattcccggatcgctgattgctattattgtagtgacagtggccgtctatctgatgaagacttatggcggaatagattgcattccgaccatcggtgaccgtttcaccattaagtcagagttgccggacgctgttgtaccggctctggattgggaagctatcaaaaatctgtttccggtagctatcactattgcagtgctgggagctatcgaatcactcttgtctgccaccgtagccgatggtgtgataggagaccgtcatgattccaacacggaactaatcgcacagggtgcggcaaatatcgtagcgccattgttcggaggtatccccgctaccggagctattgcccgtacgatgacgaatatcaacaatggaggtaagacaccgattgcaggtgttatccatgcgattatccttcttctgattcttcttttcctgatgccccttgcacagtatattccgatggcttgccttgccggagtactggtcatcgtatcttataatatgagcggctggcgcgtcttcaaggctttactgaagaatccgaaatccgatgtcaccgtactgctgatcactttcttcctgactgttatcttcgacttgacagttgccatcgaagtaggactgatcatcgcctgtgtactcttcatgaaacgtgtcatggaaactactgaaatctccgtcattacggatgagatcgacccgaataaagaatcggatatcgccgtcaatgaagaaaacatcatgattcctaaaggagtggaagtatatgagatcaacggcccttacttcttcggtatcgctacaaagttcgaagaaacgatggcgcaactgggagaccgtccgaatgtgcgcatcatccgtatgcgtaaagttccgttcatcgactccacaggtattcataatctgactacactttgcgaaatgtcgcagaaagaaaagattaccgtcattctttccggagtcaatgagaaagtatataaggtgttggagaaatccggattctatgaattgctgggaaaagaaaatatctgcccgaacttcaaggtagcgctggacagagcggaagaagtcatgaaataaagagattccaacataaagaaagagccattttaatcccgaaaagcaggagataaaatggctcttttttattttaagagagggattaccactccactaaacttttaaaaacaagccacgtttatacatcattctcaacaggaagaaaagaataagatagttagcaaaagtaagccatacgggataataatctcccatgtattgtttcagtccgtaactgactgaatcagcaatgcaacggaagttcaccacttcgcccaacagataagccgtgatggaattcataccatacactttcagccagttcaacccgcggctgtgtcctttatagtcaatccaataataaaataatgccatcaacagaaagcaataaccaccggatagtaatgtcatactacctgtccacaaacgcttaatgatgggcatctgcaaactccaaagcatcgccagccctactaaaagcacaccaatgaccgacagagtctgtaccacctttttacggttcgctttcccttctttcataatctttccggcaaaagctccgagcatgacagtcactccgaatgtcagactgctccatatccatgtgtaattgtaataaggtgaaaagctccacgttccgtcctcattccagaaaacaccatctctgaaacgacctaagacacatctatccacctgttcggcaaagtttccagccggtgtgaagtcacccaaaaatgtcatgggaatccagtatatgaaaagcaacaataaagtaattcctatctgccacctgaatgaaaaatgtaactgaatgactgccgcaataaaatagccgacagcaatagactgcaaagtatttgaatagagataaatatgactgctgtccagtccaagcagatttccctgaacaatcattccgaaaataaacagcagaaacacccgcctcagaatcctccgatagacgggccagtaactgccggacataccgacgtactttgacagtgaaaacggcatcgaagcgcctgtcataaacaggaacaacggcatcacaagatcccagaaacggaatccctcccacacttcatgatcaaactgataaaggatatcgttgagaaacggcaagttcaactgtcgtgccaatgccgcaaacaccggctgaaagaagacaagaagaaatagatcaaaacctcgaagaatatccaaagaagcaagtctggatgtgttattctctgataatttactcatagtattaacaaattcatattattattcagttattgtctcatcaaaaacatattctgtaaagcgtcttaatacaaatatattcaaaacttctttcccctgcaagtacctcggaaaggaaatgaatcattggaagagaagcgaagttagagtaaatcgaccaaaatctgtcagagaatgactaaatagtattattccatattcaaattaggttgtaattttgccctagacctaagtgaagtatttgtcaaatcctaattaataaaacaatagtatgaaaaaacattttctgatttttacaatctctcttttatttttctcgcttgcacaaggcaaagtgaagctccctgccatgatgggagatcatatggtactccaacaaaacagttccgttaagctgtggggatgggcagacggcaaaaaggtgactgtcaccacctcttggaataaccgtacttataaggtatcgacagacgatgagggagcatggctggtcaaagtggatactcctgccggaagttttactccttattctattaccatcagtgacggaacccgggtcacgctatcggatatattaataggagaagtatggatatgctccggtcagtctaacatggaaatgaccatgaaaggaaacatgggacaacccatcgaccattcgctggaaactcttctgaacgcaggcaactaccgcgaccgtatccgttttatcactgtcccccgaaccaaaggagtgaaagaacggacagactttgaaggagcgaaatgggaagtttcttcgcccgaaacaactatggattgcagtgccgcaggttacttctttgcccgacaactgacggaaacgcttcatctccccgtaggactggtcatcaacagctggggaggttcacgaatcgaggcatggatgacagaagaaacgctcgcctccgtggaaggcgcaaatatagaggccgccaaaaatccaaagttagatacgaatagccgactgcaatgtctgtataatatcatgttactgcctgtgaaaaactttacggcacgcggatttctatggtatcagggagagtcgaatctattcaactatcagatctatgctccgatgatgaccgcaatggtccagctttggagaaatgtatgggaagcaccggatatgcctttttattatgtccagattgctccgcacaaatatggaaacagccggaatataaattccgccttattgcaggaagcacaaatgaaagcattacagacaatccccaactccggaatgattcctacgatagatgtcggcgacgagttctgcattcatcctcctcagaaaaatgtagtaggactccggctggccaatctcgcactgactaaaacatacggtctccataaatttccatctaccggaccaatgatgacaaaggtggaatattccaagaacaaagcgatcgtcacgctcgacaatgctccttccggactggcaccgggcaactgtgaattggaaggtttcgagattgcaggagccgacaagaagttctatccggcaaaagcacggattgcaggtcgcacaagaaatgtggaagtatggagtgatcaggtcgcccaaccggtagccgtacggtatgctttccgcaattatgtaggaaacatcactttacgcaatacattagggatcgctgctttcccgttccggacagatacatgggatgatgtaaagtaagagctgattagcctgtgtgcagggtatatatgtcctgcgtacaggagctatatatccaacgcgcaggagctatatatccaatatattgggcatatagctcctgtatattgaataatagtcctttttcaatacactatattttattcattcctgcacagctttgaatcatttcctgcgtgtaatgagctaaac

SEQ ID NO: 4635 - DNA, 2082 bp, Unknown
  gut microbiota DNA sequence
acaaacggtagattccgaaccttggttcagattgatgtttttctcctccaatccgtcataacaacctccagtagccggattgtaaacaatctgatgcaaatgattattgcccagaaaccaattgaaagcatctttttgcatttggagatacttttcttctttgaaagccagataaaatgttttcagcgcaataaccattcctgccacatctacgggttgttcaccaaatccatgactggccttccctttatgcatccacccctgattggaaatcacctgaatgcgatttcctacaaagacctttttcaataagaattcaaaagattcatgagcaatttctttatactcgtccctgccaatagccaaatgagccagcaacattgcttccggtaaaatagcattatcataggtgagatacgcctcaaaccatctccattttccgtccgccgtgtgacgatacaactgggcaagcttattggccagcagccaaatgcaagcatctgtctgcgccgaaggacactcttgcctataataataaaaacccttaagcataaaagcaatgctgcggggagaatctatccggtcgaacaattgaaatgtccgcttgaaaacagtctctgcctcctccttccacggagcaggaaaatgagcggcacaggagataaaatatcccaaagcacagatagcccgcccgttgctatcatccagtcccacttcctgattttgtgaagtaaaaaccccatctttgtctacataattcataaaagagccatccgactgttgacaataacggataaaattcagataggttttgatataccgttctttcacctttccctgcttcatagcaacaagctgacacatcgacatcagcgcacgtgccgtatcatccagcgtataccccgtagaactatccggacgattaccttttgaaaactggataatcccccattgccggctcatgcgccggatatggtaagtatctatgggaggcaaagagtaaaccagctcttcctctaccttgcccaccttctgaaagagatacgcataagcaatagccacattttcccaagccgtagccgccgtcttctgcaaaccgaccagcttcatctcaacccgcagcttttcatcggcaagcaagcgattggcagcttccgacagttgaaccgaatttttaaaatcaaagataataccggagtcatcgctcaacaattccaatgcgtgcggaataggagtagctataatcgggcacccacagcttacagcatatacaaatgtcccgcttaccgcctgatgcgggtcactcgaagtgaatagatatacatctgtcaactgcaaatactccagcaaaacaggaagttcaagatactgattgataaaaagcacatagtcttccatacccaactccttgatcttcgcctccagaaaattgcggtatttctctccttctaccctcaagactcccggatgtgtttttccgataataagaaatatcacggaaggattcgcttctacaatggccggcaaagcatccagagtcgtctcaatactcttcccgggactaagcaaaccgaaagtggaaagaactctcctacccgaaagctgataaaagtctttcagtttgttcttatccctgaacgataccagatgagtgccatgaggaatcaccatgactttatcttcatcagcatgataatctcccaacaagatacgcctggagttttgtgtcatcactaccagttgcgtacaggcagacaccattctgcgtactgttccgtacattgccaaagttggttgcgaaagtacagtatgaaaaacaagtatcacaggcttacggagctgttccagcatttgcagaaaggcttcttcctgctccgcatacaaaccgaactcatgttgcacaagtactatttccacttcgggattctcattcaactgtctggtcaaagcagcaaattccgaaacatccgaagtattgagaacatattccacatcttccgtataggtatgtttttccgtatcggactctactgcacctatcttgatggagtaagattctccgaactttgacaggatagcccg

SEQ ID NO: 4636 - DNA, 564 bp, Unknown
  gut microbiota DNA sequence
gaaggtaagatgactatgcgctacattggtggcggtcatagaaaggtgattagaattgttgatttcaagagaaataaggacggtgttccagcagtagttaaaacaattgaatacgatccgaatcgttcggctcgtatcgctctgttattttacgctgatggagaaaaaagatatattattgctcccaatggattgcaagttggtgcgactctgatgtcaggtgaaacagcagcgccagagattggtaatgctcttcctcttcaaaacattccggtgggtactgtgattcacaatatcgaattacgtccgggacagggtgctgctctggttcgttcagctggtaactttgctcagttgacttctcgtgagggtaagtattgtgtaattaagttgccttcaggtgaagttagacagattcttagcacttgtaaagctactatcggtagtgtaggtaactctgatcatggattggaaagttcaggtaaagctggacgttctcgttggcaaggacgtcgtcctcgtaaccgtggtgttgtaatgaacccggttgatcacccgatgggt

SEQ ID NO: 4637 - DNA, 6282 bp, Unknown
  gut microbiota DNA sequence
ataatcaacgagcctaacagaagaatcggagtctgaagtacagaagtataaagtaccgatttcataccaccgaagatcgtatatagtgcagtgagaacaaccagtccgatggcggcaatccagaagaagtcgattccccagagttccttgatgccgaatacttgctggaataccagtccgccggcatatactgtcactgctaccttggtcaatacataacttaccagtgagatgaccgataagatggtacgtgactgaggattgtaacggcgttccagaaattccggcatcgtgtataccatgcttcgtgaatagaaaggtacgaatacccatcccagaatcaggatcatccatccctgaatttcccagtgagccatcgccataccgcttgaagctcctgctcccgccagtccgatcaagtgttccgaaccgatgtttgatgcgaagatagaggcaccgatcgcaagccatgttgcgtcacgtccgcctaagaaataatctgccgagtcattttgtttttgtctgactacccaaacaataatacctatcagagccaaaaagaagactccaattactagccaatctaatgcttccacaataaatttgatttataagttaatattatttctctgtcgagaatttaaagatacattcgctgttgtacgtttgtcccggttccagcacaacggacggccagtcggctttgttggggctgtcggggtagtgttgtgtttcgaggcagacagaagcacgttggttgtaaacgatgcctttctttccgcttacggttccgtcgaggaagttacctgtgtatacctgaatacccggttcgttggtatatacttccaatgtgattccggtttcgggagacgtcagtctggcagctacctgcgagatgtcacctttggtgttgagcacccagttgtgatcatatccgttgccgttcttgagttggacgaagtcgtagttgttgatatctttgcctaccgctttcggagtagtgaagtccatcggagtatctttgaccggagcgatttcgccggttgtcatgaaggtgctgtctaccggagtatagtaatctgcatttacatacatgatgttgtctgtcgatgtttttgatggatcaccagccagattgaagtaagagtggttggtcatgttgatgattgtctttttgtcggtagtagcgctgtacttgatgtcgatggcgttgtcatctgtcagttgataggttactttagcagtcacatttccggggaaattcgcgtcaccgtccgaagagataagagtcagttccagtgttgtcggatcgataagattggcttcgtatacttggtattgccatcctttcgggcctccgtgcaggcagtggccgaagttgttttgcggcagttggatggtatctccgtccagtacaaaacgcccttggttgatgcggttggcgtaacggccgatagaagcaccgaaatcactgggtacattaatataatcagcaatgctgtcaaaacctaaaactacatcctgcatcttgccgttcttgtcgggcaccatgatggacacgatgcgtccgccgaagttagtgatgcatacttccatacccgccttattctttaaggtataaagagctgtttgggcattgttcacttctgtttgaaattttgccgggtcaagaccggataaagtcagctcggaagccggcttgttattgcacgcggcaagcatcagcgcggcaattcctgcaattagaaaatgttttttcatggttttatttttaatgtaaatgagatgcttatcttattttgggtgtaaaagtaacacttttgtttggtgtatcaaatacactcttatatgttgtgcaacataaaaggataagaactttactgttacgtataaaactatcgcatgttcctgtcttcggagcgggatcgttatattgcattttctctttctatatagagctggatagtttctggggcttggaaccagagtttcaccagcttgaaactaaagtttcttcagtttgaaactaaagtttcctctgcttgaaactagagtttcatccgcttggaactgttggttccggcatatggaaacgaatggacctacgcatgacctgtcggcaaagtccggtagatatagagcactgtgacagcaaaaattgccatcacagtgctgtcactagttgctgtcactgctttacttcttcattataagcgagttatgctctgctttgtgacggtgacagcaaaacacatatttatttttctatagagggttattggagtttcttcccccaatatgtcttttgattaccctgggccgcatacacaatcgtatgtgtccgcggactggcttcccagtcgacttcacgttgcagatagagtactactccggcgcttgtcgtgatggtttgagtcgctgcatcaaatgtccatgtagcatttttccagctgccggaagttatcttatgcgtaccgagatcataagtcatcgtttcggacattcgttgggtgcccgtactggtggtcaatgccagatgttcccagtctccggctatttcattttccgtgataggcgcttgcggaacggctccgtaacgttcgggcataacgagaggccagccgttggcatcccagcggatgctgcgtacatgtcccatcatgatggcgttggagtattcattgccgcctacgttcacagggaaacgtccttgtgaagtatagaaccagttgccagctccgtcatcgaagatgccgcaatgggaaattcctacccagccgtagctgttgtcgaaccggtaaggagcagtcagtatcggatatagttgcgcgcttcccatagcggaatttccgtgtatgtctacataagggccgtcgatgtttttagaacggcagacacgtgtattatattctaccgacagtgaaccgtaagccaggaacagatagtaataaccgtcacgatagatcacttcgggaccttcggatgcctgccagcggctggtgccacgtgtggcgattatctttccataacccgaattgtcttcccctgtgatgtcccagggatttcccaaagcattcagcggtttgccgtcttccggatttacctgtagggcagcgataccgctgtgccatgaaccatagatcagccagtgttcgccattttccgttattatataagtagggtcgatcgcattgattttaaaatacccttcccagtcattgatgctgctgcgcccataatccgtctttcccttatcgctggcagagcagacaacgaatcctttgtcttcccatatattacttgccggatcggaagtttccatcagtccgataaacgcgcgttcggtccatgaaccgtcaaagttgccgttgttctcaatttccggttttccggtttggatgtagttcgtgattacgatggaataatacatacggtattttccgttcgatacttttcgtgcaacaggtgcccagtatccgtaagacggattgtcaatcggttccagtcccatctcctgacggtaggcattcagcttttctttgatccatgtcgggggcgtttcactcatagttgctcccaggtactcccagtttacgaggtctttggaacgccgtgcgtggaagtgtccgtttccgctgtgcgcgttgccgtaagaagcgtctgtctgatacatatagtaatatccgtcatcggttttcattaccgtagggtcgtgtacgttggcaaggttccagtcataacggttgctccaggctgagaaacttgtgtagtcgtctacatacgtgggtgcttcgtacgctgccagttcatcgctcagtgtctcggcgggagtcgtgaaagaagtttcctccgagtatctgggctcttcgttgtaaagggtgacaaaggctcttacgtaatacgtcgtctgtggagtcaggccggtcagggtcgtactgatttccgatcctctgacttcggaggtcgtgtcataaatgtccggatgggatgccgtggcgtagcagaatccccgtttgacgatattcactccttccgttccgctgatattggcggataaggttgctttgttataccccacattcgtatatgccggcgttgtgatgcttaaagcttctgatgcggagttttcatcgtcgtcgctgcacgctgccagagcgagcgtgcaacagagtagaagatagatggtctttaagtatttcatatctcagtctttcttttttagattgttttgatgtttattcgttagaagcgcttccggtgtcccatcccggattctgtcccagattgggtgcccgtttcacttcgttggcaggtatcgggaaatagtaactcttgggattgacaaacgtgcgtgaattgaccgtttctgccagtccgaaggtataggagggagtatctgcgttgccggtgaccttcactccataaagattcagcaactggttgtaacggggctttccggtttctcccgtagaggttacattgtcatatagtttccagcggcgtacatcgaagaaacgatgatcttcgaaagccagttcgatgcgtctctcgttgcggatacgttcgcggagttcactttgcgacatatctgcgtaggccggcataccggcacgggcgcgtacctcattgatgtaactgtatgccttggcaggaccttccgcttcattataggcttcggcggcattcagcagaatttcgccataacggaaaatcatccatgcgtgaggataggtggccggttctttgcaggaaatgttattcacgaactttttcagatagtatccggtgtaggtgcctcccatggctgaggtgtaatccactcctttgtccgcatccgagttgtagcgtacgtcgatggcacgtctttcttctttgtcggcacgtccccacatcatgccttgatagaagatggtttgtgccagacgcgggtcacggtctttatacggattggcggcatcgtaggtactgccgttctcatcgatccgtttgccgttgctcatttcgtaagcgtccaccagattctgtgtcgggttggtacgtccgtttccggagaaagaaccggtaaagcctaccggcaggaatactttttctacctgattggtattccatacagagcgtgcaaggataatttcattgttgtataccggattggtcgtgaaacattcgtaatagtcattctctggatttcccgtattgtacagtcggtaagggtaactttgcttgttattctgagtgatgaagtcggctgctgcctgcgccgcattcgcccagtatgcggtgttgccgtccggattgttcagtttggaagcacggtagagcagggctcttgcctttaaagcataagcggcggctccgttgacacgtccccagttggatgcttcatcgctgtagcggaaagggagctggtttttgatctggtcgcattggtcggctacccattcaagtgcttcggcagcgggagtacggaacatgttcattgccgaaggatcggacaagtcgaagatgatcggttcgccggattcatcttccgcaatgacaggggcagcgccgaaccagcagattaagtcgaaatggaagatagcgcgaagcagtctggcttctgcacagtaacggtcgtaaaggcggttgtcatcgccgtctttctccgtatttcctactacggatgccttggcgttcttcagaaacatattacatttccgaatcccgtataagtcggtgttccagaagcccagcaggggatggtcgccggcggtgtatccgtcgctgccgatctttgtataataatgaagtccccagcaggtcactgcattatccgtcatacagtcacgtgaagcacctgtgaactggtcgtccgacagtggcgccagtccgtccggcagattcgtgtagatgttggcgaggaactcgcgtgtcaggttctggttattgaacactttcttttcagacaaggaggcatcgtactctttgtcgaggtagtcgctgcacgaactgcctgcgagtgcgaggaccagagtagctatataagttgatattcttttcataattctttgctgttttattgaatgattagaatccgatattcacaccgaacgtaaatgaacgtgtcttgggatatgcccagatatagttggtcgggttttccggatcaaagcctttaggcagatggctccagttgcacaggttgtagccgctgaagtaaagacggcatttcgtcatattgactttagaaatcaatcgtgcaggaagcgagtagccgacttccacattgcgcaatgaaaggaa

SEQ ID NO: 4638 - DNA, 6745 bp, Unknown
  gut microbiota DNA sequence
cgtagctgtctattttacggtcgccgttcgtatcctggaatacggcattgccgagcttgtatttaccggtagcgttccacggatatttctgaggattggcaacggcatcttcatacgactccggaatcaggtcgggattactggcccattgtttccagatcaggagctggctttggtcgatacggttgccggttcttgcctgataagcgtaatcgggagtcagttcatccatttcggtgattttgttggtgttgaaagtcagcataccgtcgatatagtattcgaaatcaccgatccggttgctatgtcctaaagtgatctcaaaacctttcgtttcggccttgccgtaagagtcttgcggagcgtttacaccgaataagctgggcacggtggaacgggataccagaatattggaacgccattccttgaagaagtccacagaaccgtagattttcttgttccacaagtcgaagtcaacgccgaagtttgccatatccgagatttcccatttgatattcttgttgccggctgtcgattcatatacaccttccgtgtaagattgggaagtaccgaaattatatccgcctccttcggtgaatgtaccttggtacgggtagcggctgacgcctgtcacagcttgtcccgcccgtccgtaagaagcacggagtttcaggagattcacgaacgagttcttcagccatgattcttcggaaagtacccatcccacggaaccgccggggaatgttccgaagcgttcgccgtcggcataattatcactgcccatgcgggagatattaccggaaaggatataccggttgttatatacataggtagcctgtgcattataagagaggtagcgattggatgattcctgtccgcgtactacattctgataagtacggataaaagcctgggcattgacggcatgtttgccgaatgtatgttcgtatgccagtccgccgttcatattgagattatagtaatagtcacgtggagaagtggtggcattgggcaatgctttgtacgttctcatgcgttggtatgtatattccgacgggtcgttgacatcagccatatagttatagtagtagacattgacatcggcttgctgcaccttctggaatgtttcgtaagagtcgaaactgaacgtcatcttggctttcagtccgggaacgagggcatccaggtttccggtagccgttacggttgtatagaggttacggcggcggttctgttccacaccacgtccggcgatttgtgcggcaccgtttttactgtcgctgctggtcggcataaagaattcaccgtttgggcagaatacgggatacaccggaagattttcgccggctccccaggtaaagaggttccatacgtcaatgcccggttgggagatattgtcgatacgtccgcccaagtccatcgatacattcagaaacttgtttacatcgatgtcgatgttcgaacgcaggttgtaacggttcaatacttcctgtgtgctgtatccttcgttccattccgtccatttggtgtcgaacaaaccttcctggcggagataagagaaggagacatagtagcgtgcacgtgcattaccaccgctgacagacaggttggtacggtattgcggagctgcatcccgcagcatggtgtcgtgccagttcgtattgaagtatttgtatttggccattccttccaactgctcaccgttgcagacacgacggtagtattccaggtcttcatcggaatattcgggacttaatccgtccaggtatcgtgcctgattacggctcagcgcatagttataagaattctggctttcgggaattccggcaatagtctggaagccgacttcttgtgtgaagttgattttagtcttaccggtttctccgcgtttggtcgttacgagtactgcgccgttggctccacgcattccatagatagcggtagcggcggcatccttcaatatcgtaatcgattcaatagggtaggcatcgaggaatgagaggtcacgttccacattgtcaacgatgatcagcggactgcgtgcgctggcattcatggtacggatgccacggatatacatagccgtttcactccatcccggttcggattgcgcctcatacgtctctacaccggtgacagtggaggtaaacgcattctgcaaaacggttaccggatgtttttccagttcttctccggtgacgatggaggtggactctgtcacaaacttcttgggtttgcggttgaaaggaagcggagttgtatgagcatattcatccaggtcggcatccatgacaatcttgaaattctcttcgaagtcggcaatggccgttgtcggcagataacctacgctgcttacataaagctcgtcggcaggttttacattcttcaaagtgaagaaaccgtccttgtccgagagtgcgatgcggcttgcttccgctacgttgaccaccgcacctgcgataggttcaccctctgcatttacgattcgtcctttcaggactttagcatcttgcgcccatccgttgcccagcatgaaagctgtggctacggtgagcaggattcttttgaatcctgtctgtatgttatttaatttcatcggttgcatattcattcagttaattgttccaacccgggttgttttcgatattcgttttccatacttctccttccggtatcgggtagagatacattttctccgtaaatacccggttctgggcaactttacgtgtatagacaaactttccgttttccttggtaacctccattccgtagataggacgtgccaatgctttttccgctacattccagcgacgtacgtcccatgcgcgatgatcttcaaaagcgagttcgacggtacgttccttgcggatgaagttacggcggtcggcaatggtctgaagatcgctgcggtctgtgagtttggcagtcatccctacacggtcgcggagaggctggatggcattcagtacgtccgcacgtgacccaccagcttcattcaaggcttctgcgtagttcaataagatttccgcatagcggatgataatccagttacggtagttgctgccggtatggttattgttcaggatcacttccggaatatacttgcgggtatagtatccggtcggcgttgcatttgcatttccttgcgggttatcccgttgtcctttgagtacattaattataccattcccccaattcacaccgttgtagagtacggtagccgccagacgcgggtcacggttgctgtaaggatcattgctcttgtatccgctggcattgttgatggccggagtggctgttccattataaacaggggcgccggtttcatcataactgctgaaaggagactgtccgttcgccatatcgtacatatccactaaattctgtgacgggcacaaacctccgttgccgccttcgcctaccggcgtatcgttatagatcgctccccatcctacagctacatcattacgccagaagatcgtttcattatttttctcgtcatgtgcgttcttcaggatggcgttggtatagcaggtcttcggatcggtatcggtcgtgtagagtccgtagagcgttccgtaatccgtcatgaagctttgcgccgcatcggcggcttgctgccagctgatacccgattcacttctgaaacggtcgcttgccatgtagagcatgacacgtgaatacagtgcacgtgccattggctggctgatacgtccggggttgcccgattcggcagaagtagctttatccatcaatccttcttcgcaatctttcagttctttcagaatgaagtcaactacatattctttcagggaagggcgggtggtatagttgctgagcaagtctccgtccggatcgagtacatctgtaaccagagggacgggaccgtagcggagaaacatttcccagtagaaataagcacggaggaaatgagtttccgccttgtattgtttcacataggtagcgtgtgcttcttccgagtcatccgtagctttgggcacgtcgtcgatgttctttaaaagcatattgcatttgcggataccccggtaatagtgttcccatgtgccggtgagttcagtggcggcaccgctggcataatagttaccgatgttgaaacttgtacgcgtgccgccgctggcgtagctggtttcggctaagtcggtagctgcatccatccatgagttgttgatgcggcaggcaccgtggcgcaggaagttgtaagtatcgaaatggaactcacgggtagtagtccattggctgaatacctcttcttctgtcagttcgttgctgggctgtttgtccagaaaaccaccgaatatatcttcacaggaagtcagggcgattccggcggttgccaaccaaaaggcggtatatatgattgtctttttcatgtcttatatctgttagaatttaatgtttacaccaaagttcacagtcttcataattgggtaacggttggaaccttcactttccggatcgcaaagaccatccagtttatcccacgtgatgagattgtttgcatttacatagacgcggcattcgttcatggctacttttctgatccatcgggccggaagcgagtagcttagttcgatattcttcagacgaaggaagttaccgtttttcaggaagaacgagtttttacgctggttatggtcgccgtagctgtcataatggagcagcggataactggcatgggtaaggttgtatgcttccgactggttgggattccagcggttcagatgatgttcttttaccttaccgccattcacgaaagcgtacattgcttccgcatcataatatctggaaacatgatctactccctgaaacatgatgctgaatccgatgcctttgtattcgcatcccagagacaaggcgtaagtgttttcgggaacatcgctatagccgataaatgtttcatcacggctatcgataaatccgtctccgttcatatcacggtatttcaggtcacctacctgtacattgccgaaagtagaaaccggaaaatcgggattgttcaagtcggcttgggtcacaaaaccatcgcacaccagaccgaagtattggttgatcggatgaccttcctgtttgcgataagctgtctttgtggcgggttcgtccatgttccggatttcattgcgggcgtgtgagaaagtcagacttgcattataggtaaagtcctttccgatatggttcgcatgtttcagttcgatttcgaagcccttgttgttggtctctcccagattgccggcagccatattgacgcctacccattgcggacgggtgaggtaaggagtcaggatatcgtttctcttttcgtagaatacgtcgatattaccgttcaacagtccgttccataaaccaaattccagtcccaggttgtatttgtgagcacgctcccaagtcactgcatagttagggtactggctttcatagataccggtatatccggttgttccgaagtgatagtcgttggctatctgtgtccacactgcctgatacaggaaacgttgttttacgccattcactttgtatacatcgtttcctacttcaccataggatgcacggattttcagattgttcagccagtcttccgttcctttcatgaaagcttcgttgctgattctccatcctacggagaaagaagggaagaaaccgaagcgtctgcctcgcatgaagttttccgaaccgttatagccgaagttgacttctgccaggtaacggtcgtcgtagccgtatgtggcacgccctaccagtccttggtagcgttcggcaaggtctgcctgataacggtagtcattctggttgtacagtgccatagcggtgatatcatgtttcccgaatttgcgtgcccagttcagctggaattccatataaagtttataagtagtagtctggttattgcccagataagcaagttccgtatccgtattgaactgggtataagcgtctattgaattataattagtacggtcattcagctcataagtggcaaagtcggcattgaaagcacgcatatagtaagcgtcgtagtcgaaagataccattccttttgctgccagccctttggtgagccagtccatcttataatccacaatgaaatttgtttcattgatcgtattggtggagcggtagaaaccggctttggcaaaacgtgccacgatattattctggtattgtgagctgccgctgtacaatgtcttctggtcttcaccttcacctacggtataggataccggaaacaaccatcccggtgtatgattcatttcataaaatgcctgactgtaagttccgtctctcgattcattcgagttcggtcctctgcgttcttcgaaacgtgtcccgaagttgacggaaagagtcaggtctttggtcatcaggaagtcgagattggcacggaaagcgaaacgcttgaagctggagttcgacttgtttccgtattcgtcctggctgaattccttgaacaatccctgttggttataatattcggcagaagtaaagtaacgcatacgtttggtaccgccctgtatattgacattgtagcgttgtgccggtgcactgtttcgcaaaacggtgtcataccagtctacattcgggtagaggagggcatcgattccgctgagttgtcctgctgaggctcttttatacatttcgatgtcggatgccgaatattgagaaggcagtccgtcgttagccagcgcttcttccagcaatacaaccgaattgtaagaatccagataagtat

SEQ ID NO: 4639 - DNA, 7308 bp, Unknown
  gut microbiota DNA sequence
ggatgattgattccgtcaaacagggagataggccacaaccaggaagagaaccaagtatccagacagtcttcgtcctgacgaagatcatccatcgtcaaagcggcgtttcctgttttctctttggctttagccagcgcttcttcgggagtagtagctaccacatagccaccttccggcaggaagtaagcaggaatacgatgtccccaccacaactggcggctgatacaccagtctttgatgttctccatccagtggcggtatgtattcttatatttggcaggatagaatttcaactcatcgttcattaccggaggcaatgccatatcggcaaaatgctgcattttgaggaaccactgcatagacaatttcggttcgatcactacattggtacgttccgagtaacctactttatttgtgtaggcttctgtcttttcgagcaatccggcagcatcgaggtctttctcaatctgcttgcggacgtcgaaacgatccataccgatatacaatccggcagcttcgctcaaagtcccgttatcattgaagatgtcgatgctgggcagattatacttttcacccaacatatagtcatttacgtcgtgggccggagttactttcagacaaccggtaccgaactcaatgtccacataatcgtcctcgatgacagggataacacggtttaccaacggaacgattactttctttcctttcagccatgcgttcttggggtcgttggggttgatacacattgccgtatcgcccatgattgtttcgggacgggtcgttgctactactgcatagcggccttccggatcaccttccaccttatagcggagatagaacagttttccgtgctcttccttgtagatcacttcttcgtcagaaagggcagtcaacgctttcgggtcccagtttaccatacggacaccacggtaaatcaatcctttgttgtacaagtctacaaatactttcaatacgcttttgctgcgttcctcatccatagtaaaggcggtgcggtcccagtcacaggatgcacccagtttgcggagctgcttcaggataatgcctccgtgctcttctgtccagtcccaggcatgtttcaggaactcatcacgtgtcaggtctgtcttcttgatgccctgggcagcgagtttgtttacaacttttgcttcggtagcgatggaagcgtggtcagttcccggcacccagcaggcattcttaccttccatacgggcacgacgaaccaaaatatcctgaatggtattattaagcatgtgtcccatgtgcaacacaccggtgacgttcgggggcggaatgacgatggtgtaaggttcacgaccatcgggtttcgaactgaataaacggtgttccagccaatactggtaccactttccctccacgtcagcgggattgtacttacttgctaattccatgtttctttatgtatatgataatgtatattcaaaaaataacggctgcaaaattaataattttaattcaaatcttaccacccacaggatgtttctgtgcccggaaagataatttatatccctcataaacagcaattccataaaataaggcggacatcgacaccacattcttcaccatgacagaaaagatttcgccataatcgactcccgccagcacttcgaaaaaggtcatatcataatccttggcagcaaagccgatgatggataggaaatcacccaacacacaactgatcaatgccagtgctgctccaagaagaccgaagacgggacgtatccccttcccctgccgcatggcgaaaccgaccaggaatccgactccgatagccatatatcccatctgaagacctgtagaaacggagatgagactccatgccaccgcccccaagatacatgcgacggatgcatacagcactcctttgggaagattttcttcggcgagaagttcttcttccgtcattgacaccggaaagtcgtcgggcttgggaggagccatcttcaacagttcttcatccttctcgaagttttcgcattcttcgtcaaagtcaggaagctctctggtacgtttgcaaacaagccctttcccattcacgaaatcacgtgacacgcaattccggcaatacttttcaatttcttctacggtagccatctttcgtttaacagtttttttgcaaatatagaggtattttttcgcgtgacgtttatttaatgcatatttttgttgactaaaatctgaacggatgatgaaacggaaactgataattagatatatactcctgggagtactgctgcttctggtatggatgacacagtcgattcccgcgttgggaaacctgtattcacaaaccgtttatcctgtcatctcccgcgttttgtcattcttctccaacttatttccttttgccataggggatctatttattttcgggagtatcacgggagtcatcgtttatcctttttatgcccgtatccgcaagaaactgccgtggaaaaggattctgctacgtgacggggaatatctgttatgggtttacgtatggttctacctcgcgtgggggttaaactattcgcagccaaacttttaccagcgtacgcatattccttatacagcttacacaccggagatttttcaagagtttgtggatgactatatcgactcactgaacagtttgtttgttcccgtaaaaggaatccatgagaaacaggtacgtgacgaagctgtcaaactttacaatcaattaagcgacagcctgggagtgcaccgcccgccatttcccaatccacgggtcaagacgatggttttcaccccattcatatcaatggtcggagtgacaggaagcatggggcctttcttctgcgaattcaccttaaacggagacttgctccccatcaactatccggcaacgtacactcacgaactggctcatctgctgggaatttcgagcgaggcagaggccaatttctatgcctatcaggtttgtacccgttcacaaataaagggaatccgtttcagcggctacttctcgattctgaatcatgtattggggaatgcccgacgactgttgagtgaaaaagaatacgccgatataatcaaccgtatccgaccggagattatagaactggcgaaaaagaatcaggaatactggatggctaaatacagtccgttgatcggtgatgttcaaaactggatatacgacctctacctgaaaggaaacaaaatagaaagcggaagaaaaaactattcggaagtgatcgggctgttgatttcgtatcaagtatggaaagcgaaaaccgcatcagaccaataaaaagacttttattagcgcccttgcttctgttttcgtaccgattaaggctataaaagacaaggaagcattatctttgcaacattatttataaaaaaatcaaaggaatgatacatacaagagaagaacagatggaagccttcggccgctttctggacatcctcgacgagcttcgggttaaatgtccgtgggaccgcaagcagacgaatgaaagtctgcgccccaacactatagaagagacttacgagctttgtgatgccttgatgagggatgacaaaaaagatatttgcaaggagttgggagatgtgctgctacacgtagcattctatgcaaagatcggttcggagacaggagacttcgacatcaaagatgtctgtgacaagttgtgcgacaaactgattttccgccatcctcacgtattcggagaagtaaaagctgagactgccggacaggtatccgaaaactgggaacagctgaaactgaaagaaaaagacggaaacaaaagtgtattaagcggtgttcccgctgcactcccttcactcatcaaggcttaccgcattcaggacaaagcccgcaatgtaggcttcgactgggaagaacgggaacaggtatgggataaggtaaaagaagaaatcggagaattccaagcagaggtagccaacatggacaaagagaaagcagaagccgaattcggtgacgtcatgttcagcctcatcaatgcggcacgcctctacaaaatcaatccggacaatgctttggaactaaccaatcaaaagttcatccgccgtttcaactacctggaggaacatacgattaaagaagggaaaaacctcaaagatatgtctcttgaggagatggactctatttggaacgaagctaagagaaaaggactgtaacaccatcctccttccttatggaatggatataatacctgtccaaactctgttattcccacttccaatggtctactcttttagtaaagcaacaaagatacatccggaaacaaaaatcagaggctctatcctatgcggatagagcctctgatttactctgacagaacgtctgtttcatccaaacagagcctccgttttatttcttccttttcggatcatttcctccgtccttgcggttcatgcctttcagcatttcccgatggaaacgcatctccgcacgttgaacaaggaatatcttcttgttggaaagtatctttttaaaccggtccagataagacttatcaagacggtcggcagcgatacggttgtcacatacctttgctacaatttcttcgtactgggcttctgttgttttgtcgtctttacctcgacgcattaaactccacgattcatcgttcagtttcttcttcttctcctgcagttcaaaataaaccgggaagaatttggcagcctcttctttggtcaatccggcctgctcaataataaacgctttctgtttattccggaattcctcacgggacaaatgctggtcacatccatcggcagcccaaagaacaggcataaagccacataacaaaacgactaaagcgattagtttcttcattttcttattcaatctgttttaataaatcattctacactcgcgtcactcagatagacgtataacgaataatcatccaacatcgcacggtctaacgcaacatcaatcatctcatcggatacctgttccgtatccgcttccatagccgttactgccaccgctatatcatctgccaccggtttatggtctgatgacgctacccggataatcagggcagctcctacaaacatagccgccatatagaataatggtttcaatctcgtccatgtcgaaacatgctcttccttgaaagcgactttctctttttcaggaagtttgttcatcacctctgaagtcagattttcaaagtaaccgtcgggcactttgaaggaatgctcctttccgattttcttcaatagggtatcttcttctttcatacgtttttctcctctcttttgattagacgatatctgctttaaaaggtttaatctacttcttccaaaaacttctctattttctttaccgcatggtgataggaggccttcagcgctccgactgaagttccaaagatttctgacatctcttcgtacttcatttcctgataatacttcaggttgaacaccattcgttgtttttcgggcaaggtcagcaatgctttctgcaataacatctgcacctgatcgcccgaatagtagggatcactctccagtttctgcacaatcgccgcttcgggatcgtcgatagccaccgtcgttgtagcacgctgcctgttcagaaaagtaagacattcattcagcgcaatacggtagagccacgtagacagcttcgcctcggcacggaaatagtcaatatttgtccatgccttgatgaaggtgttttgcagaaggtcgttcgcatcttcatgcgacagtaccatccggcggatctgccagtataactgctcgctgtattgcgccacaatcaactcaaatcctttccgctgtgtactctcctcctgaaggagtttcagaacctcacgttcgttataaggggtcatagtctctcgtatctgtatagttatttatggttatgcacatattctctcttgccaaaaccgtttgggggaagatagccgctgcttcattcaacaatacagactcgtcctcatagcgggcagaaaaatgtccgataaccaattgtttcacttcagcattcaaagcaatctgtgcggcctgtgcagcagttgtatgatgagtttcccttgcccgcacctgttcggtctgagcaaaggtggcttcgtggaaaaggaggtctaccccctttatctgctccacgatctcaggtcggtaaattgtgtcggagcaataagcatattttcgtgcaggggcagaaggacgggtcagccgatgattcggaatgacttctccttcggaagttacaaaatccgctccgttcttgatccggttcagttcgtagacgggtactttatagaaatccaccatatctctgatgatatgattgggacgctgcttttcttcaaaaagaaaaccacagcaaggaatacggtgtctcagaggaatggtggtcacagccaccgagcggtcgtcatagatcagcgtcggctccttcgtctcaaattcatggaaaaagactttataggccagcgttttgcaaaagaaagaaagtaagggagcaaacagttcttccagtcctttgggtgaatggatatgcaagtctgccgttcgtcccaacagaccgaaggtagaaatcagccctaacagtccaaagcaatgatcgccatgaagatgggaaataaagatatgattcaagcgggaaaacttcaagcgggaacgacgcaactgcatctgcgctccttccccacagtcaatcataaaaagcttttcacgcaagttcacaacctgcgatgtcgcaaaatggcgagtggtgggcaaagcagaaccgcatccaagtatatgtagttcgaatttctccatagcggcacaaatgtacacaagttttttggtatttgcgctatcatggcaaaacaaaaaaagcgccccgataaccggagcgcttttccattatatagaaataacgattatttctttccttccaactgttctttcaaagcagccaaagcgtcgatgtcgcccagcgtagttgaagcagcctggttctggatcatcggagcatcttctctcttgttgttagaagacttcttagcaccggaagcagctttcttttctgctctttcttcggccttagctacatcttcgaagatacggctgtgagacaggatgattctcttagcgtctttgttgaactcgatcactttgaattcaagtttctcatccaactgagcttgtgaaccgtcttcttttacaaggtgtttcggagttgcgaaaccttctacaccgtaaggaagagctacaacagcacccttatccaacatttcgatgatagtaccttcgtgtacagaacctacagtgaatactgtttcgaataca

SEQ ID NO: 4640 - DNA, 135634 bp, Unknown
  gut microbiota DNA sequence
ttatcggcatagatgcttccttttcttgcgcaatcaaaaataggaatactataattgccgcagacttcaatcatagcatccactactttttccgagtcacttcctttaaagtttttgcagttccagcgggtaaagaaaaagattttcgctgtcggatatttctcgactaagcctttgcacagaatttccattttatccttgaagttatcaatacctccgatagaatccagtttaaatgcatcattatgtccgccaatgacaatgacataatcgaggctatccgccatctccgcatatcgcagatacatcgcttttccccatcgcgggctggaataagctatgctattcccattctttccataattaaaatactccataccgtgcttctttgcaaacttataatgccatgtgttctcaaacggctctttatgatttctcacatagctgtcacctattactccgatccgcttgccgttaagtttgtcagtaagcgctataccagtctgtgctttcccatccaaaacggataacgcacaaacgattaacaataaaaagatttttaaatgtgtcatcactttatgtatttttcatttgctagcaaagataagggtagttgtaatgtcagtacatgtaaattcatacgttttccattaaattcatacacttttcatgctttaatccggtttttacgcccaaattctccaagaaacggacgattttccatctttctatacttatttgccattggagcaagctacgactttgcatatctttgccaagaaagttatccatttctacaaaagactacaaacgtatgaaaaaacatctgattgcctggggcattttatctaccatgtttatggcaaatacttttgcccagaaagacatcgaccgtcctattatgggatggagttcatggaacacctatcatgtaaatatcagtgaagagttgataaaacagcaagctgacgcattaatcaatcacggactgaaagaggcaggctacaactatatcaatatagatgacggcttcttcgggcatcgggacgaaacggggaaaatgcatccgcatcccgaccgttttcccaacggaatgaaagtggtttcagactatatccattcgctgggactaaaagccggaatttactcggatgcaggagacaacacctgcggctctatctatgacaacgacgcaaatggagtgggctccggactatacggccatgaacagcaggatatggatttatatcttaaagaatggaactatgattttatcaagatcgattattgtggcggacgcgaactggggctagacgaagaaaagcgctacagcacgatttgccaagctattgccaatacaggaagaacggatgtatctatcaatatctgccgatgggcttttcccggtacctgggcaaaacgactgacacgttcctggcgtatcagtcctgatatccgtcccagatggaattcagtaaaaggtattatagaaaagaacttatatctttccgcctatgctaccgacggacattacaacgacatggatatgctagaaatcggacgtggactgaaacccaacgaagaagaagtccattttggaatgtggtgcatcatgagttctcccctgctaatcggatgtgatatgaatacgattcccgatttctcattgaagctactcaaaaacaaagaactgatcgcactgaatcaggatgtattagggcttcaggcacacgtcgttcaacatgaaaatgaaagctatgtactggtaaaggacatcgaacagaaacgcggactgacaagagcggtagcattgtataacccttccgaccagccatgtgactttatcgttccttttgaaacccttgaactgggtggtaacgtaaaagtacgggacttaatcaaacagaaggatcttggaaaaatgaaaggagaaatacggcagactgttcagccacacagcgtaatgatatgcaaaatggaagctgaaaaacgactggaacccgtatcttatgaggctgaatgggcatatcttccctgctacgacgatctgggaaagaaatccaaaccaattgtttatgtacctgcctccgattgttccggcagaatgaaaatatcccgactcggcggccgggaagagaactttgccgaatggagcgaagtatacagcgaaaagggaggtaactatgaaatgactattttctactcttgcgacaaaaaccgcaaactggaagtttctgtcaatggaacgaaaacagtactcaaagatttgaacagtaacaatgaagtgaaatctgtgactatccctgtcagcttaaaacaaggttacaatacggtacgaatgggaaatgacttcggatgggcaccggatatagatcgttttacagtatccaaacaataaattcctcataatatcaattatagaatgaacaagaaatttagatgcttactggtatctctgattttcacagcaatgtggaatgggactaccatacaagcacaagttccccatcccgaacgcatttatctttcgggaacaggcattgacgacaccaagacctgggattttttctgttctgcgggacagaatagtggcaaatggaaaaagatcgaggttccctgtaactgggaactacagggattcggagaatatacctacggtcgatggtataccataaaaggacaacgccccagtgatgaaaccggaatttaccgctataaatttgacgcccccaaatcatgggcagggcaacgggtaaagatattctttgacggagtgatgactgatgcagaaatcatgataaacggcaagccggcaggtgagatgcatcaaggaggtttctatcgctttaattatgatattaccgaattactcaatcttggaaaaaagaatcagcttgaagtgaaagttgccaaagaatcagccaacagatcgatcaatgccgccgaacggaaagctgactggtggttgtttggcggtatataccgtcctgtatggttggaagttctgccacaggtacacatggaacatttcgtactaaatgctgatcaccatgggaaattacaggtcgccgtagatatggcaggagatgccaaaggacatgaaatcatcgtatctgtccgttcattaaaagacgggaaaaccgtatatacctccaacggacaaacaacaatcactcatccaatcaataactccgataaggagcagatgattagcggtgaatgggcaagcatcattccctggtctacagagaatcccaatctgtatgtagccaaattggaattaaagaatcccgaaggtaaaatcgtacaaaccagagaaacacgcactggtttccgtaccgtagaattctttccccaggacggcgtatatttgaacggtaccaaactagtggtcaaaggaatcaaccgccactcattttctgtagacggagggcgtaccaccagtgctgcattaagccgaatggatgccctgctcatcaaagaaatgaatatgaatgcagtgcgttcgcactacccgcccgatgaacattttcttgatatgtgcgactcactggggcttgtctacatggatgaactggcaggctggcaaaacggttacgactccaaagtcggtgcaaaactcgtaaaagaaatgattgaacgggatgttaaccacccctgcatcattctctggagtaacggaaacgaaggaggctggaatacgcaaactgatcctttgtttgcccaatatgacagattacagaaacgccacatggtacatccctgggccgactttaacgacttggatacacatcattatcctacttatctgacaggcgtagcacgtttcaccaatggttataaagtattcatgccgaccgaatttatgcacgccatgtacgatcagggaggaggagccggcctgcgcgacttttgggatcgctggtgtaccaatcccttgtttgcaggagggttcatctgggtatattgcgatgaggctcccaaacgcagtgataaaggaggaatactcgactctgacaagtccaatgcacccgacggagtagtaggcccacgtcgagagaaagaaggaagctattatgccatccgtgcacaatggtcgcctatccagttgaaacctcttctcattactaaccacttcgacggcagtttccttctgaccaatgaatatacttttaccaatctgaaagagtgtcgtatgacttataaggttttatcgtgcggcactccgctcaaaggagacgcagaagcaggaaaggtaatcgctgaagggaaagtgcaacttccatccattaatccgggagaaacaggtactgcccgttttgaactgcccgattcattccgggaaggggatgtgctcgaactggaggcttttgatagagaaggaaaaagtatctgtaactggacttatccgattcatctggcaaaacaatattttgaacgtaacctgtcacaaacgacactcacgcctgctcctcaaaaagcagaagcccgacaaacgtctgacgccattgaactaaagagcagcatagtcagcataaccttcgatgcggcaaccggtatgatccgtcacattaaatccggtgagactgagattccattcaaagatggtccggtagcagtaggtatgaagatgcgatatgaaccttcgctcagctatactcgtcattcctccgacggcgccatttattgtgccaaatataaaggtgcggcagattccattgtctggcgtctgacaaacgaaggtttgctttatatggatgctattttattaaatcgcggttccggtggtggtggcttcgacgatgctttcatggatgcacaggttttcaatctcggacttagcttctcttatccggaacaaaactgttcgggcatgaaatggatgggacgcgggccatacagagtatggaaaaaccgaattccaggaacgaactacggtatctggcacaaagattataacaacaccattaccggagaaagttttgagaatctgatatatcctgagttcaagggttaccatgccaatctctattgggctacactggagggcgagaagacttcatttaccgtttattcacgtaatgacggaactttcttccgggtattcactccggaagaaccggcaggacgggtaaaagataccatgcctgcattccctgaaggtgatctttcattcttgcttgatattccggctatctgctcgttcaagccgattgagcaacaaggtcctaacagtcaaccgggaaatatccgaatcaaatcgggagatgaaggattacatctgaatctgatgtttgacttccggtaatcctgagtaaaaacacttaaaaataaagataaaacgatgaactgaaaattgttcttggaacttaagtttgtttgcgtcgtatctatagcatataaataaggggctatttgattaaaacagccccttatttattatttcatttattacttagtcgtcatcttcttttccgcgcttttcagccctttcagagaagccttgatcttcacatttccactagtctgactggaacgtaatatagccattacaaatccttgatgtaacttcttgtggtttcctgagaaaagctcatctgtcatatgatcaccattatctacggcaatcagtctggcttcacctgagacttcaaacgtaacttcaccttcagtagcaggtaccacccgtcctttactgtcaacagcatatacctttacatactgcaaatccattccatctgctttccagtctgcattctccaactctattttcaaagctttcgccttacctgtcgtttccaacatatgacgagcaacttcttttccattgttacgtgcaatcgctatgatgtttcctcctttgccataaggtatattttgccagtaaatcatattgcggctttgtatatcatcacgtttattcttctgaatacctaaagatttcccattaaccaataactccacttcatcagcatttgtataagtgaacagattctgcttacttccttcagctctgttccaatgagatgaaagaggcatacgacctactatgacatcattccattcaatactttctttctcactatcgactactccgatatgaactaaaggctcatcactgaaagcactctttatcaaatacgcttgaggatagggttccaaagcatgattaaagaatgaataattccacccttttttaggccagccgttcgattctccccagtattcgatagctccccaataggcaagtcctaccatcttatcccggtccataccgaaaaaaggagcagtaagttcactacttgttgcttcactctgataaacgattaaatcgggacaagcttcgagatacttcgcataatcggtatattgataattgaagctggcaacttcagtcaccgtagacaattcgggaggaagaattttcttattgaaatccgcatcttttctgctgatggcaccagccctcgatggatacatagccaccgttgtctttcgggtagaatcgtatcgctttacaagcacatcgaaaattcgataagtcgtaacaccccaatcgccggtaggaaatccagccagatcttcccgcatctgcaattcgttgccgatactccacataataaccgaaggatggtttctgtcgcgcttaatccattcgggaatcatcttataccacaattgagtaaaaggaacccggccaccccaatatgatttgtcgctccacttatcaatcaattcatctacaatcagaataccatgtttatctgccaactccataaaggatttcgaatatggattatgtgatgtacgcacatgattataaccgaacttcttgagcaattcaaactgccgttcaatagcacggtcgaatgccgctgctcctacagcacctaagtcatgatgattggcaatacccttcaagaatagtttcttaccattcagtttaaagccaaactccggagagtattcaagtgtgcgaataccaaatttctcagtcacgttgtcgatcacttttccatcacggaccaatgttatttctgctctatagagattcggtgtttcacaagaccatagctggggattggaaactgcaactaccggaagcggaacttcaacagtagccagtttattttttttaggagccattccctttgtttccgtcaccaattcacctttcggagaaaagattctggcattgatttccacatccagctgtttcccggaaataccttccacctcaacctgtacattgatatctgcactttgttccgttattttaggagtagaaataaacacgccatgacgggctatggaaacatagtctttaaccagcaaatggacatcccgaaacaaacctcctcccgtataccagcgtgatcctccttttttgccggtagaagcactgacagctaccacattatctgcatcatatcttagtaatttagtaatatccgtttcaaagccaatatacccatagtctgtacctcctactttctgaccgtttacccagacatcacctattaacataattccttcaaaatcgagtaatacccgttttcctttccattcaggatcggctttaaatgttttacgataccaaccggttcccatcgctttaaaaccacgagctccccctgcatccttatcccacggctgttctatttgaaagtcatgaggcagatccagtacacgccagctactatcatcatagtttacagaataggcatctttcaagtcacccgcatgaaatttccatccgaaattaaacaagcgagacaaacgcccctgcccatcagcattttgtgcagcgagcaaaccaaattgaagagtcaataaagataataaaatcagttttttcattttgtgtatattaatagtttcatggtagcacaaagataagcccagtttcaatatcagtacatagaagtttgtacatttacatagattatttatcgtttatcacccgtaaaacaaaaaaagtctcaagtagagacaaactacctgagacttttatttaaatatgattacttactttttatacaaatcagaccctaaataataacccaactgcgtaggttgattatatcctatgttttgattgagggcactcatttcataaacatgatcactcatcaaataaggaaatttataatctgtcggataccaagtcgtaaacaggcgtagttcagtctgatcacttgttacctgaataatttcctcgcgccagtctccccagatatccgcatagaaacagggattacttttactactattgatagtagtcacttcatatctataaatagtaaatacacgtttttctttgggcgcatcaatcttactccggtctaataattgacgattcaacgaattggagaaccagacagccatattgtaagacatactgctagaaccggctccatatccgagatcagctcccgtacaggaatgtgcattacctttataccaccacatctcacagcccggactatcgggatcaatatcggctaccagacaacgtcccatatctccactatacggaaaatcccagatagtctctcccgttctcgcatctctcaaagcagcacctactttaaaaggacaagcctcaaagcaagaccaaatttgcagtccttttcttgacgggtcaaacttacccaaatgcaaggcatctccatgtccatgcctggagttccacaagcctttaccattatggtctatacaacaacctccatatacaacttcgtcacatccgtcatcgtctacatctcccacacttaaactatgatttccttgtccggcataatcaccgtgcacaccgtccgaagtatcgaatcgccatctcttctttaactcttggccctgaaaatcccaggcttccaataccatctttccatatactccacgacaaatcagaatagagggggtagtacccgaaaaacatcctactcctacacgataactggcagaacgtttgtaatagttatctccccagtcttcgcttttacctaacgcgatataatcagtacgagccaactctcttcctgtcataccatccaataccgacagaaattccggtccgccatgaatatgagccgagccttcgacacgataatcgactttaccatccccatccgtatcttttatttctgttccatctccaaagacagtaccttctgcggtacgaaccgcaatttcacattttccgtcaccatcaaaatcatagacagcaaaagaggtcagattacccaccgggacattcggccccaaagctacacgccataagaacgaaccatctaatttatatgcttccagcagggtagtatgccaaggtcccatctgtacggcttctgactcatcctcttcgtcctctgtcgaagaactgcttctcaaaagccttttcagtacaatctcataaaccccatctccgtccaggtcaccgacactggcatcattggcatcataataatactctgaactgacacctgtggtaccggccaatggtatggaaatatagggcagtccggccgatgcctgtactgccgttatggtataagtatccaacgtttcatcagaaccggcaaaacataaccgatacgtattatccttattacggtcggcagttatatcctggaagtttgtcgacaaagtaatcggttcttcattaagtttcacctcttcttcattaccgctcttccgataaaggtcaaagcctgtagaagaatcatcggtgggaaacatacgccagctcactaatatcttattattgtattcgggatagtaagaagcatcttttcttccgttaatcgaagcccacaatgcacgtttcaaaggaggctcgacccgctctgccggaggagtcggttcaggttcatcaccattcaactggatttgattgtcagtacacgaaactgtaagcaacaaaattgctgccagaaaaaacaaggcatttttcattttaaaagaatttagttaaacaaataatgatctgtaagttcacaaaaaacacatcgctgatctttcaccaagcttccataaaaagtgcacaatgccgacacttcgaaaagtatcctttttatttcagattagtagttcagcgatggtcaaaagtacagaatcatccacattctcaactggaattatgtacagtttacatgtaaaaaaacagggatgaactcaaaaacaaattaaagttcatatatgaacttttttgcttagtctttattatcctccatttgataagttacattcttttctaccacattttcaacattacttactttcttcacaaacttcttaaccgaaccgacctttacatcctttatccgcacattcttcacaggaagttcagcatttcccttcagttcatatacagcgtctgccgattcgcaagttactttatccatatagatgccatcgatacgagtgattcgcttttcataagtcgggaccaagtccttccactgataaagcacctccgtatctatttcaagtacccgctgggctgttccggacgctacatttttcatatagatattctctataaatcctcctctgcgatgatttgttttcacgaagaaaagacgcatcactgaattaggtgctgtacagtcatgcatatagatattccgtataccaccggagatctcactgccgatgcccagtaaggtatgtcctttcaatatctgacaatgacggatcacgatattctcacaaggggtattcagacgccatgcgtcctgattacgaccggctttaatgacaacagcatcatcaccctggtcaaaagaacagtcttctaccagaaaattacgactcatttcaaagtcaataccatcattattgtgcccatgtgcccgcacatctaggttacggacgatcccgccatcgcacatatagaggtgaatggtccagaacggactctcacgaatcttaaatccatccagcatcacattcttacagcgattgaaatgtatcagatgcggacgcaaatgattttcacctaccgccatctgacgttcaataacaggcacatcggtagacgccttggtataaagttctttcaacgcctccaaatgaggttgagggcgtttgaaccacaccttccaagttcccatcttcggttgcaaagtgcctttaccgctgattgctacattttcacattcaaatgcataaagcaacggtgagtaattatagcattccaacccttcccatgaagtcattactgccggaagataatcttccggattgtccgtaaaactcagaacggcattctcttccagatacaaattcacattgcttttgaaatgaacaggacctgtcagccaggtacctgccggaacaacgacacgcccgccacccgctttgttgcatgcgtcaatagtagcagcaatcgcctttgtattattaatttctccgcctgctacagccccaaaatctgttatcttaaaatccctgtccggataaataaacactttaatcggttgcatggggaaaggagcttttacttttattgtcttatagttcccacctgccaaagaggaaagtacagttaacaaacaaaagcatatactcatcatacatttaataaaacttgttgccataatattattttatttttaattattcaagtgtgacaaagataaggctattgccttacaaatattatcagaacctaattgttgttttatattcggggacaatctctacatgactaatattacaaatttcttcttgttgtgtaaaatcaggaataacttcacttggaagatcattcaagaaagaagcttttttatgtaaagggcggacatagaaattcatatcatgctctttcaactccttttggaaacgcttcagaccaattgtccatggagcaccataataaaaatgatcaagtatcatcgaatcattcataaatgccattgctacatctcccacataatgaatgcgcaagaaatattcattaacctgaggcaaagaaggctgctcaacatgtacagtcattctacgtacgccaacttttttccaatcagctgtgacatgaacggcttccacctcagcagactgctgtttccaaccgacatgtgaaggataaagaatataatcaatacgattctctcccagactaagcagagtacatttatctttttccggcaggacagtagcacgggtaatcaaaatatgatcatttacttttgtggtgttcaaggcttgctcacgagtcaatgttgtaactttcaatttctttccttgcttagtagtaaccgtaaatgtactttttgttcccggcattggtgtataaaatgctttgcccgatctcaaagtactcttatcaaaactatattccggagtaagtccttcaggtgcaaagaaaaaataatgctcgaaaccattatcttctatcttagtcaacagttgggctgtcgcatatttcaaaaccgcatcttccatacgcaaattaaaaggcagaatagcacttacatcttttttcaaggtgaaagtacctttggcaggaatcatcagtttctcactctgaaggttcagtttgaattgtatattttcctgatcaatgcgtgctgtatcatggtcctggaagttagtcataaaaataaaacctgaattatcctttacacggacagcatatcgcaacgtctctctattatccggagttatccggtcatacccctcagacagaacggtttccataggagccagcaagctactaaagtcttttaagaatgtatgaagaacccgcagattctgatatgaatcacgtattaatccaaattctccgataggtgcctgaaaatcataagaaatcttaggtactcccataggttcatcactaaagaatccactgttattgcttcgcttgggtgtagagcccccatgatacatatagtagccgataccattcgctccacttcccaaagtccgtaccatcaaagcttctgccgccttagcttttactataggcctccgggcataaatcatctgaatcccgactcccatttcagcacagaaagaaggatacttctccgtatcataacgaacaggttcatagtccggattacgttgaatatccttaaacaagcagaattgcgacataaatggttctgcccaaaacggatatgtataagcggccgttacaggtatggcttcatttcctattaccgcagcatttccccatccggtagctgtatacaaaggagttatcataccttccttctccgccatttccttcaaagtacgcatgtgtaattcacctagctcagctgttgtaatctttttctcctgagcgcttacaccaaccatggtaatagatgaatcatacgtagctgacgtaaaatctttcctttctcccggataacaaatagcccatggagcagccgaatgctgatgttcattttctatttggataccaatgaccggaccaccatccttataatataacccctttaaccgagcagctatttctttatataatcgccctacatatttcagatagttcgcgtcgttggaacgaacttccagcggttttgcaaacaaccaatcaggaagacctccatttcgtatttcaccatggcagaagggacctatacgtacgattacagacatatcatgcttatggcacagttctataaatttacgcaaatctttatttctcgaccaatcaaaaacaccttctttctcctcatgaacattccagaacacataagtcggaatgacagttaatccacccgctttcatttttaagatggattcttcccattgctccacgggataacggctataatgaaactctcccataataggaattacaggttttccattctccatcatataaaagctatttacttcaatgcttcctcctgttggagaagttcctcccagtttcaaatgtccgttgtatattttctttgctacttccggaattgaaagttcatatacatgctgtccccgtttaaccaacgctacatcatcaatatgacaataagcattcgcattcccttctgcaacaaacccaatctcaactttaccatcttttacaagcacactcttcagttcaatagtcgtccatgccgcctgttcctctttgatactataactatagactttatcgttgctgacagcatacatttcaagtttagtaaaaccattactgtttctgatttttgcagacaatgtgtaatagccatcctgtaaaggaacataaggtgaagaagttatcacctgagatacttttcttttgaatttaatatgatcactaatattcatacttttctctccaacaacaactttccggtcatccttactgttcatgtagttcaacactggtgaacaagaatctccaacagctatctgattaccttcgattatagtagtagtccaacccaacaattgctcttgaacaggtttacgagcacttgggatatactttctatcagcctcaaaactaccatttttcacataattattgtcgtcggcaactctccactcaccagtttctatattcagatgccatgaactaagtgaattaaaatatggagtatctccattaaatgacaacggacaccattgattatatcccagtccgttccctgcaaaattagcccatctatccccgcaataaatgacagtttcttctttacttcctcttactgtgtaaaaaaagcctgtttgcgtgacatgagcatagtctgcagtacatccatccattattttcatgtcattagacggcatataagggccccttatatcatcggccatcagataatacgcatacgaagaatcccagccatacaaattagaagcacacatataatatttacctttatatttgaacatacagtttccttcacgaccttcgccatgaaaaatttgtgtacagtctaataagtcaatcataccctcttttactccaatctcagaaacataaattttattcctgccacgaccatacgaataaatcagatatgattttcctgtgtcttcatcaataaacacggtttggtcaccagtattagtagtgccaatcatattcttcatgttaatctgccgataccatttaaattctcctgcaggagtatccgacacagtgattaacacttgacttccatgttggacaaacatcgcatatttgttcagttcccgaacataagctattcctaaccgccctacccaagttggttctttgtcatattttacctccttctttgtcaatacatctccttcaaaagtccagttgaccagatccatagaactataacaggtgaccgattcaaaatgattgtccgaatatgttacagaagagtcatggcggtaaagttctgcttctttgtaatgtactccataccaatagaatttttctttttgtgtcttcggatcgacaaatttaaatatacctcctccctgactataaataggttgccgattctcagtattccaaaatacatcattttttatatgaagaaattttccctctactatatttcctttgctctgtccaacgatataattaacctgtgacaaaaagagaattataatacaaaatagttttttctgcatgatatattataattaaagattacaattacactaacactactcaaaaatcatttaatcaagacctctataagtccaccatacggattaaagtcaaaggttactttatgagctgatatctgtaccggcaatttcttctttccctgccgaacaataactttcttaaccttttggcctgctattaccatagtcaatggttcaataaatatctctttatcgagttcaagtttcagggtaataagtaatttattattattctttagtacattcagctgcgtattttctctttcttttatataagatactacttcacgaaatgttcctacccatattttatcttctttcgcctttacctgatcccaatgatcccacaaacgctggggattacgaaaagcatcatatccataagttaatccatgtgtcatccctactccccaatcatttgtttcaatcaatgtattcatccatttttctaaatcttcaggagtagacttgctgccaatagagcgttgtttgagtctcgttcctacacgattctgttcagcaattctccttccctctgcttttttattgttattgggataacaaaaagtacggggaattacctctatattggcaaatatcgcactatcattttttaaaatatcttctttgatttcttctataggaaaacgtgcaaagtttttatgcgcccaaccgtgattggatatctcatgaccattatctgacatttccctgagttgtggccaggtcattcgtgtagtgtcgctaatggtttcactatctttattaattttggaaccacagatccagaatgttccccggaaacctcttttttccaattgaggagcgacaagtgtataatgctccgccaatccatcgtcaaaagtataactgatagcacaagccttatcctgtttgtatttggcaatatacacattccagtctgctcccgacaaactgttactagtgattaataaactcaagataaagagtgaaaagatcttcattgttctgtcgttttattggtttatcttcacattattcatcacaaatgaatcgattatactctgatctacttttcctttcttagcccgcactgtcagattctcaaagcagaaatcagacaatttatattgatcggacttcttaacattaaagaacacattacaatcaatgtctatattccgcatcgtaatgttattagaataagaaagaggggtatctttgcggtctttcaaatcgtagaactgtgtccaaggagctatattcaggcaattctgcacatttcctgtaatatcctctaccagaatatattcatatttttgtggtgtatcgggacgcattttaaaggttagaagagcacgtgccttatctaccttgcaacgacgaacaatcacatttcggctaaggatagattcactaccgcaagtaaaggcactatgacagaatccataagtgcagtcttcaataataatatcataattttctccattattggcatctttgtctgcccaaggtccttttccacctttcagtgctaccgcatcatcattgacagacatatagcaattctttatcagcacattattacaaacatcaaggtccactgcatccgtactgggagcttttacaggactggcaggcgaagtaatgcgaagattcaacaacttcaaaaaactgcatttatagaaatgagtgctccagaaaggagaattcataatcctgatcccctcaatctgagtatttttacagttggacaaataaataatgcgaggacgcatctcttccatattagtgcaatccggatttatagaacgccgtaaccagaatgatttccagtaccgaagtccgtttccattcaatgtcccctttcccgaaatagtaaatccatccagtccgtctgcatttaccaaagccatgaagtaatttaaggtttgcccctccatacgagtcatttttaccggaaaatgactgatatcatcacttccctttaatactgcattttcttccagatgtaaatgagtattattcttaaagaaaagagagccgcttaaaaaggtacctttagggatgactataactccaccaccattctgagcagccagatcaatgacttcctgtattttcttcgtctgtacaatcgtactatcattcactactccataattagtaatgctatatttctttcccaaagcattcacattcacttccttattttccctgaaccagtcagggattgctttaccatcaggaaaaacctcctgagccaacatctgtgtacaacacagcattaacactaatccaacaatttgtttcatcacctaatattatctttttaatcttatcaaccactatttataatgaaaataccaatacccctgctgtcggaatctctttcgtccctatcaaaaccttacttccttcaggtaagttgaatgtataaggacgatcagcataattcagcactatccccaaaccattccggtattccaccgtaactccataaggcaaatccatcacgggaatactcagttgcgcatataatttcttcaagatatctttttccaatgcaccattatggctgtccactccgacatatgtcaccgtgcctttgcccagcttgcggaacgtgacggcaggaccaccttcatagaattcattggcatacgtcgcccaaacctgcgaatctgatgcgggaatcagtatttctccccatgtattccacatatattgctttccattcatgacaacagtacccggatcttccggtaacagcaaatcataaaagttcatttcatttccggtcagaggagtgatcattgaaccgaaaggagcttccggcaaacggccataacggtctttctgtgctgtacgacaggtcaatacaagattaccgccattcttcacgtaggcaatccatttacttactaattccttatcagccagttggtaagcaggagctatcaccacgggatattctgtcaggtccttctgttcggagacaaaatcaacaggggcgccaaatgactttaaagtccggtaatatttctcgatatgtgcaaaagtatcccatgtacggttctgtttctgccgttcgatgctccaggagttttcgggattgaaaagaatggcggtacgacgggccagataatcggcaggtttcgtttcgcggggagcataatgcttccggagttcccggatttcttttataaaagtttcatattctcttccgccgggagtaacggttacgccgtccgttcccactattccataatgatactgctccgtgccgtataaaggttgccgataacggtatgtacagataaaatcgcttccaccggcaaatacgctccacatccacagacggacagctcccggaagtggttgcggattaatactgccccagtttacttgtcccggttgtaactccatcacaccgtatgtaccctgtatgggacggaagaagtcattcgcccatgcaatacgcaacggattccccacccgataaccgcgacggccgatgccttcgttatcgccatacaccatatagcgtgtatagctctggaagtcgagtgcgggactgccaccgatatgaccttcgtcataattgggaatatagttggtagttatccattgattcttcgcatatttcctgatcagcaggcattgttcattcaggaaatcattggtctcctttgcggcaaaacgacggtaatccagaatctgatgatgattcataaacatctggacacgcttagggagggttatctcatcaaaagacgaataagcttcgctccagaaagcggttccccatgcgtcgttcagcagctgaatgtcgttattgtattttgtacggagataatcacggaaagccagttccgccttcggattatagtcgaactgtacggcaggttcattgtcaagctgccatccgacaatacgggaatcattgccataatgctgtgccagtttctcaatcatcttatacgataattcccgatagagcggcgaagcaaatgaggcatgctgacgggcaccatgatcaagaatcgtaccgtcttcattcttcaacaggatttcgggatacttccggctcatccataccggaggcgtggcagtcgaagtacacataatgactttcagatcatatttggcggcaagagctactgctttatccagccaggcaaaatcatagcgtccctcttccggttccagctgcgcccatgcaaactccgcaaaatgcgtaaactcaaatcccagctcgtgcatcttcttgaaatcacgttcccactgactttcatcccagtgttcgggataatagtaaactcctgtcaatgtcaggtctttatcgttgaaccaggaagaagtttgtgcttttacggattgcattcccccggaaagggccaaaagaccggcacaaaagactgtcagaattttgctcttcatattctctgtcattatagttattacgctgttttagttattcataaatcttccattcccacaagcctgcgtccccccggcgaatgtgcagacggagataacgggcttcaccgataccatcggcaatatgtggagagcgggcttgtactttcccttgttcggcacatatctgccagttcttcccatctacagatttttccagtttccatgtatgcccttctgtgggacgggtaaagaagaaatgacactcactcacctttcgtacttctttcaaatccgctgtgataaagggactactgtcggtatcagccgccatccaacgggttccgtttgattcgtctgccacatgagcagcctgataagtatgcgtacgggtgtaattcttcactgaacctttgtccggcaaaggttggttgggctgtgtctcgatactgaccgttgaagtgcgcggcgctttctcgctggaagcataaaaatgagattgaagcgccacatttttcctcgtttcctgcggggtagtcagatagcctactccccgcatatccggcaccagcgtttttattgttccgtcttcatcaaattccatccggttggcatatacctgacgggtagtaccaccgtctccatattcaaggtagacgaagatatattcatctgttccctcatcatagaacacattgccatgtcccggtccccagacctgattttcaggagccgagaataagaagatatcattgccttccggttttacaaagcctgtcagaggagattcacggctcatcatataagcattggcatagttctgatgaccgctcaatgtatacacatagtaataaatacctttacgcttgaacatcagcggcccttcggaatacccctgacgggcagtttttatacttaccggttccccgtccacgtgtagtttgtcatccgaaagacgggcggccagtctgcgccgccaaaaaatatagcctttaccatcttcatcaataaacggttctccgtcaatatctggtacaacagcagggctatccgcttcctctgttccgggcaaggaaagtcccttcccctcggcaaaccggaaagggccgtccggacgatcggcaacaagcacataagtgcccatcttctcgtccggctttacaaacgttacatacaaataataccttccttcctgttcaatcacctttccgggagcccaataccggaaatatcctttcttcttttcacctttgtcattttcatattcatatcctttcgcccagtcgaaaccgcgaatgtgggagcctgcaaaactccagtttacaaaatctttcgacttccataccaccggagttccggcacgtcccaaaccgtaatccaaatctgtcgtgccatacaaatagtacgtatcaccgaacttggagaccgaagggtctgccagattatcaggaattaacggattataactccgattggctatcagagactctacgacggaagcatccaccgcaaaggcagtcccgtggcggattcccctcggaaacgaaacctgatcggatacatcttcccacgtttcaccatgatccagcgaacggacagctccgtaacgatggtcacgatacttatcaaaatacacataaagcgcatcacccacaaaaagaggtgccggtccttccgcccaatattttcccgtaatcggggcagatacctttgtcggaaaacctttggctatattcttcgtgcgtgtcacacgcaggtttttctccggaggattggagttctcattcttgacgaccataatcagatctccctgtgtagggtctttcacgatagccgcgtcgatcacactgaagtcgggattgaaaaacatcttcgtctttgagaaagtacggaaatccttcgttgtgacatagtacatacggtggttcaaccctttttcgctttcgctggtaggtacttccttgtgacgtccggggatggtggtcgcccaaaagatgtaatatgtttccgaaggctcgtcataaaagagttccggcgcccaacaattatgagctttcggctcgtacatcatcacgggtatagcctgttgctcactccagtgaatcaagtcacgggaagaagcatatccgatgatccggtccgtccaactggaagtccagaccatatgaaatgttccgtcgggagactggcatatactagggtctcgcattaatttatctttaccgacagccggagtcagaaaagaacgtccaccgttcagaggagtccaattcagaccatcataactgtaggcaagatgcaaaccgtccttactgtcattaatgaaataagaaaagagataagcagtctcacttgcaaagattgtcattaccgaccaaagagtcaaagccatccaggcaaatacttttttcatggttcactttaagattaaaaagtttacttcgcaaagatatggcatcctgcaaaatttcagaaatgaatgatgatggatatattgtcatattcatgtagtttcgtacaccaaccgccataaaagccgtttttgatacaatattctatgtatctgtacatctttctattttattgattacccaaaagctctactttagcaccagatttttaaacgtagtgaaaaacatatcaattctacatatcatgaaacaacttttagtaagtattgccattgtattcgcctctgtactgactgtagcagggcaaaaccactctttcagcctatccggaaaatggaatttccagatcgaccgggaagatgcgggcatgaaagaacaatggttcaataaatcgctcgacgaatccatcaatttacccggttccatgcccgaaaagctaaaaggggacaatgttaccgcacgtacccaatggacaggaagtttatatgacagttcttactatttcaatccttacatggagaaataccggatagaagggcaagtcaaattacctttcttcctgactcccgacaagcactatgtaggtgtcgcctggtatcaaaagaaagtgacaattccatccgcctggaaaggggaaagaattctcctctttctggaacgcccacatattgaaacaaccgtatgggtaaacacgaaagaaatcggtatgcaaaacagcctttgcgttcctcatgtatacgacctgacctcggccgtcactcccggcaagccgtgccggctcactatccgggttgacaaccggattaaagagatcaatgtcggtccggattcacatagcatcaccgaccagacacagggcaactggaacggaatcgtaggtaaaatcgaactgcagacgactcccaaagtctatttcgacgatatacaggtatatcctgatctgagtcacgggaaagcgctggtacgcatgaatgtaaaatcctcttcttctgccaaaggagaaataacactttctgccgaaagctttaatacggatacccgccacaacgtcctccctgttcaacagaccttccgtattcaggcaggagataaccgggtagaaatggaactaccgatgggaaaagacttcctgacatgggatgagttcaatccggcactctacaaactgacagccacgctgaacagcggcaagcagtccgaaaagaaacaggtacagttcggtatgcgtgatttcaagatagaaggcaaatggttctacgtcaacggacgcaagacaatgctccggggtacagtggaaaactgcgatttcccgcttacaggttatgcaccgatggacgtagcttcctgggaacgggtcttccgcatctgccgcaactacggattaaaccatatgcgtttccactctttctgtccaccggaagcagccttcatcgctgccgatctcgttggtttttatctgcaacccgaaggtcccagctggcctaatcacggtccgagactgggcaacgggcagccgattgacagatatctgatggacgaaaccatcgctctgaccaaagaatacggcaattacgcctcttactgcatgctggcttgcggcaacgaaccttcgggccgttgggtaccttgggtaagcaaattcgttgattactggaaagcgaccgacccccgccatgtatatacaggagcttccgtaggaggcagctggcaatggcagccccacaatcaatatcatgtgaaagccggtgcacggggtcttagctgggcaggctcgcaaccggaaagtatgtccgactaccgcgccaagatcgattccgtgaagcaaccgtacgtttctcatgagacgggacaatggtgtgcattcccgaatttcagcgagatacgtaaatacaccggagtgaacaaggccaagaactttgaaatcttccgtgatatcctgaatgataatcacatgggcagcatggggcacgactttatgatggcttcgggcaaacttcaggcaatctgctacaaacacgaaatcgagaaaacattgcgtacacccgactatgcaggattccagttgctggcactgaacgactattccggtcagggaactgcattagtaggtcttctggatgtcttctttgaagaaaaaggctatatcaacgcagatgagttcagacgtttctgcagcccgaccgttccgctggcacgtattcctaaattcgtatataccaacgacgaggctttccatgccgacatcgaagtttcccatttcggagcagcccctctgcaggaagccaaaacggtatacagcatcaaggatgaatatggcaaagtatacgctcacggcactgtaggcactcagaatataccagtcggaaatctttgtccgctaggaagtgtagacatgaagctaagcggaatcactaaaccgcagaaactgaatatggaaattcgtatcgaaggcagcgatgccgtcaatgactgggacttctgggtatatcccgcacaggtagaactgactcagggcgacgtatataccaccgatacactagacgcaaaagcaatctccatcctgcaagaaggaggaaacgtattgatcacggcagccggaaaaatccagtatggcaaggaagtgaaacaatacttcactcctgtcttctggaatacttcctggttcaagatgcgtccgcctcataccacaggtatcttcctcaacgaatatcatccgcttttccgtgaattcccgaccgaatatcacagcaacctgcaatggtgggaactgctgaacaaagcacaggtcatgcagtttaccggattcccggccgaattccaaccgaccatccagagcatagacacctggtttatcaaccggaaaatcggaatgttgttcgaagccaacgtactgaacggcaaattgataatgaccagcatggacatcacttcgaaaccggaaaaacgggtagttgcccggcagatgcataaagccatccttgactatatgaactccgatgctttccgcccgacagcgaatatcgctccggaactgattcaggaactattcaccaaagtggcgggagacgtgaaatcctataccaaagattcacccgacgaactaaaaccgaaaataaattaaactaattgatgactgatatgaaaacaacatttctcggacttctgctgctgacagcaacagctatcagcgctcaggaacaagcccgcacattccaactggcagacgccccccgctacagcgaggaaacaggttacggatatgaccttgcacccactcccgaaaaagggagcaaagcacctttcttcttttctgtccgtgtgccggacggtaactacaaagtaaccgtacgcctcggaagcaagaagcaggcaggtgtaactaccgtacgaggcgaatcacgccgtcttttcatcgataatctgcccaccaggaaagggcagttcacagaggagacatttatcatcaacaaacggaatccacgcatatccgacaaagaatcggtacgcatcaaaccccgtgaaaagacgaaactgaactgggacgacaaactgacactggaattcaacggtgacgctcccgtatgtcagagcatcagtatcgagcctgccgacccatctgtaattaccgtattcctgtgcggcaacagtacggtagtcgatcaggacaacgagccttgggccagctggggacaaatgattcctcacttcttcggcaccgatgtctgtatcgccaattatgccgaatccggcgaatcggcaaatacctttatcggagccaaacgactggcgaaggctttaagccagatcaaaaaaggagactatctctttatggagttcggtcacaacgaccaaaagcagaaagggccgggcaaaggagcttactactccttcatgaccagtctgaaaacattcattgacgaagcgcgtgcacgcggagcgcatccggtgcttgtcactcctacccaacgtcgtagtttcgacgccaacggacatatccgcgacacacacgaagactatccggaagcgatgcgctggctggcagccaaagagaatgttcccctgatcgatctcaatgaaatgacacgtaccctgtacgaggcgctgggaccggacacttccaaacgtgctttcgtccactatccagcaggaacgtatccgggacagaccaggaattttgcagacaatacgcactttaatccttacggtgcctatcagatcgcccaatgcgtcatcgaagggatgaagaaagccgttcccgaactggcgaagcatctgaaaatagacccggcatacaatcccgcacatccggacgatgtgaatactttccactggaacgattcaccgttcacggaaatagagaaaccggatggaaattaaaagaatcctatactaaaagactatatgagaattaaaaacctccttcccctacttctggcaggctcgttgatgatagcgtgcactcctgccaaacaagccggcaacagcttcgaatgggggcaggtacctcagcaaccggatttatcgtgggcagacagcgtaggcagccgccaacttcccggagacaagatgattatatccgccaattcctttggcgcagtagcagacagtaccgtactcagcacagaggccattcagaaagcaatcgacagttgcgctgtctccggcggaggaacggttgtcctgcaaccggggtattaccagacaggagccttgtttgtcaaaagcggcgtaaacctgcagattggcaaaggggtgactctgcttgccagccccgacatccaccattatcccgaattccgttcgcgcatagcagggatagagatgacatggccggcagcagtgatcaacattgtcgacgagaagaacgctgccatcagcggagaaggtacactggactgccgtggaaaagtcttctgggataaatactgggaaatgaggaaagaatacgaagccagagggttacgctggatagtggattatgactgcaaacgtgtacggggaatcctcgtcgaacgcagttcggacatcacactgagcggtttcaccctgatgcgcacaggattctggggatgtcagattctctattccgactattgtaccatagacggactgactatcaacaataacatcggcggccacggcccaagcacggacggcattgacatcgactcctcctgcaacatactgatcgagaactgtgacgtagactgcaacgacgacaatatttgtatcaaatcgggacgggacgcggacggactgcgtgtgaaccgtccgacagagaatgtggtagtgcgcaactgcacagcccgcaaaggagcgggactgatcacctgcggcagcgaaacttccggcagcatccgcaatgtattaggctatgaccttaaagctgtcggcacgtataccgtgctgcgactgaaaagtgccatgaaccgtgggggaactattgagaatatctacatgacccgtgtcagcgcagaaaatgtccgtcaggtattggcggcggatttaaactggaatccgagctacagctacagcactttgcccaaagaatatgagggcaaggagattccggagcactggaaagtgatgctgactccggtagaaccacccgaaaaagggtatccgcgattccgtgacatatacctctcacaggtaaaagcggaaaatgtagatgaatttatctccgcttcgggctggaatgatacattgcgtctggaaaacttctatctttacggcatcgaagcgcagaccaataaaccggggaaaatctgctatacgagaaactttaatctatcggaaataacattggacgtcaaagacaaagatgctattgtactaaaggaaaatgaacaaagtaatatccacttcgactatgttaaaacaactactgaccgtcgtactgctggcaatttgcctcattaacgtacaggcgcagcaactgactcctcccgccggaactttccgtctgggaatatcgaaaggaaccgacagtcactggctggctcctcaggaaaatgtgaaaggaatcgctttccggtggaaagccctgccggatacccgcggctttattctcgaagtagcggtcacctccttgcagcaggccaacatcttattctggagcttcggagactgtcagccggacatggatataaacgtgttcagcgtagaaggacaagccttcacctgttattatggtgaaagtatgaaactccgcaccttgcaggcagtcactcccaccgacgatatccgtttgagtaacggccatcaggacaagactcccctcttgctttatgaatcggggaaacgaacagaccgtcccgtcctcgcagggcgctgcccgctcgcagcaaacagtaaactttatttctgtttctacgagcaaaatgcacgagcagattataattattttatgttgccggatctttttgcaaagattgatgaacttaaacatagtaaaaaatgaataaaacagtagtatctccattctcctccttcgggaaggaggagaatggagatactattgattatcatttagctcaaatccatacaaagatgaaaagaatatatctgttactcagcctactgaccggttgcctgtatatgcaggcagcaatctataacgtcagagacttcggagcaaaagcggacggaaaggctattgactctcccgccatcaaccgtaccatcgaagctgccgcacaagaaggcggaggtaccgtatacctgcctgccggagaatatgcctgttattctatccggctgaaaagtaatatccacctctatctggaacaaggcgcacgcatcatcgcagcctttccggaaaaggacaaaggatacgacatggcggaacccaatgagcataataaataccaggacttcggtcacagccactggaagaactccctgatctggggaatcggtctggaaaacatcaccatcagcggtccgggactgatctacggcaaaggactgacccgcgaagaaagccgcctgccgggtgtaggcaacaaagcgatcagcctcaaggattgccggaatgtcacgttgaaagacttctccatgctccattgcggacacttcgccctgcttgccaccggtgtggaacaccttaccctgcttaacctgaaagtagataccaaccgggacggattcgacattgactgctgccgcaacgtacgcatcagccaatgcacggttaactccccgtgggatgacgccatcgttctgaaagcctcttatgcgctgggacgtttcaaagatacggagaacgttactatcagcgactgctacgtcagcggcttcgacaagggaagcgtactggacggcagctggcaactcgacgaaccgcaggcccccgaccacggataccgtaccggacgtatcaagttaggcacggaaagcagcggaggcttccgcaacatcgtcctcaccaactgtatcttcgaacattgtcggggactggcgctcgaaaccgtagacggcggtcatctggaagacatcgttatcagcaatatcaccatgagggatattgtcaacgctcctatcttcctccggctgggtgcgcgcatgcgcagtccggaagggacacccataggcaccatgaagcgtattctgatcagcgacatcaatgtatggaacgctgacagccggtattcttccattatcagcggtgtccccggtgcatctatcgaagatgttactttccgcaatattcacctatattataaaggtggatacagcgaagaagacggcaagcacactccacccgaacaggagaaagtatatcccgaaccctggatgttcggtacgattcccgccaaaggattttatatccgtcacgcaaagaacataactttcgacggtgtccgcttccactttgcacagccggacggacgcccgctctttgtgaccgacgacgcagaaaacattgaatactatcatacaccccaagaataatgaacaagaaacaactgatactcctctgtatgctcgcagcaggtggaagcatacaagcgcaacagtggccggataccccggcagaagcccgtcccggcaccagatggtggtggctgggaagcgctgtcgatgaaaagaacctgacttacaatctggaagaatacgcacgtgccggcatgggcgccgtagaaatcactcctatctatggtgtacagggcaatgacgccaacgatattcagttcctttctccccgctggatggaagtcctcaaacacacacaggcggaaggaaaacgcaccggcatcgagatcgatatgaacaccggaacgggatggcccttcggaggaccggaagtcagcatcgaagacgcggcaagcaaagccatcttccagacttatgatatagaaggaggccaggaaatcgtgcaaaatatcaatgtgacagacaagaagcagcaaccttattctgtcttaagtcgtgtgatggcatacgacgaaaatggacgctgcatcaaccttacttcccacgtcaggaaagacaaactggaatggaaagcccctgccggaaaatggaaagtgatagcgctttataacagcaagacacgtcagaaagtgaaacgtgccgcccccggaggggaaggatacgtgatgaaccatctttccaagactgccgtcaagaactatctctcccgatttgaccgtgctttcaaaagcagcaagacgagttatccgcatacattcttcaacgactcttacgaagtctatcaggcagactggacagaagactttctggatcagttcgcccgcaaacggggatataagttggaagaacattttccggagtttctggatgaaagccgtccggaagtcagccgccgcatcgtatccgactatcgggagacgatctccgacttattgctggagaacttcacccgtcaatggacggactgggcacacaagaatggcagcatcacccgtaatcaggcacacggatcgcctgccaacctgatcgatgtctacgcagccgtagacatccccgaatgtgaaggattcggtttgtcccaatttcatatcaaaggattacgtcaggattcattaaccaaaaagaatgattcggacttgtcgatgctgaaatatgcctcttctgccgcacatatcgccgggaagccttatacttctaccgaaacatttacctggctgacggagcatttccgcacttctttgtcgcaatgcaaaccggatatggacctgatgttcgtctccggcattaatcatatgttctttcacggcactccttattcgccgaaagaagccgaatggccgggatggttgttttacgcctctatcaatatgaacccgacgaacagtatctggcacgatgccccttcgttcttcgattatatcacccgttgccagagtttcctgcaaatgggtaaaccggataatgatttccttatttatctgcctgtctatgatatgtgggatgagcaaccgggacgtttgctgctattcagcattcatcacatggccaagcttgctccgaaatttatagatgccatccaccgtatcaataacagcggatatgacggagactatatctcggacaactttatccgcagcacccgtttcaaagacggacagctcatcacttccggcggaaccggttacaaagcgctggtcgtacccgccgcccatttaatgccgaatgacgttctggctcatctactgaaactggcacaacagggagccactatcgtattcctcgaaaactatccgacggacgtaccgggatacagtcaactggaacagaagcgcaagacttatcagcagacgctgcaaaagttaccttccgtttcattctccgaaacaacggttactccggtaggcaaaggcaaaattattacaggtacggattatgcgcgtactttagcaagttgtaatattcctcaggaagaaatgaaaaccaagttcggactgcaagccatccgcagggtgaacgatagcggacaccattactttatctcttctctccaagataaaggagtgaatgattgggtgacactgggaaccaaagccgaagctgctgccttcttcaatcccatgaccggagaatgcggagaagcaaaggtacgtcaaaccggagaacagacacaagtctacctccaactgaaatccggtgaatcggtgattttgcagacttatcaacagccgctgcaagctgcccggccctggaactatattcaggaacaaccgttcagcctcagcctggatcatggctggaaactacacttcgccgaaagcgaaccggagataaagggtacgttcaatatcgaccgcccttgctcatggacaggcatcgaccatccggcagccaagattaacatgggcagcggtgtttattcattggatatcgaattgcccgctctgcaagccgatgactgggtactcgacttgggagacgtacgcgaaagtgcccgtgtccggatcaacggtcaggaagcgggctgcgcatgggcagtaccttatcagctacgagtaggtcatctgctgaaatcaggaaaaaaccacatcgagatagaagtcactaacctccctgccaaccggatagccgaactggacaggcagggagtgcagtggcgcaaatttaaagaaatcaatattgtcgatctgaattatcgtccggccaactatggtcactgggctcccatgccttcgggattaaatagcgaggtccggctgattccggtagattatttatctttcaagacacactaaagttattatttaaatctactttcagttcaagataaggcaatatagttcgggcctgactaaaaagtcagtagtatctccaattcccctccttcccgaaggaggagaatagagatagaaccgactttttagtcagcctcttttcagcctgttattttaatctatacctgttattttaatctataaatgaaatagtcaggctagttcttctatggctgtaaaagcctgcttttaaagtttacgtatttctgcgtccaaggacaatgcacaagacatttcaaacaggtactgcatccatatacatcaattatatcatctcttgaaattgttatattccaagtggttcctttcaatacatttctttcgcatatatccctacaaatgttacaattaccacacttcggggaaatagaggcatacgatacagtatctaacggggcatcagtcaaaacggtaccaagacattgcgctgcaccatattcaggagtaataaacagattgtttttcccaatccatcctaatccgctaagttgcgctactgtcttgtgaggtaaaaccgactccttcgtttcaaaattaaacactccttctgccaaaagtcccgcatcagattgtgaaagagctttataccctttgctgacaagaaattcagctaactcgtctgttacttctcccactctattttcagttttcacatactcatcttcaagagcaggtttataatccggattattaaatacatcttttacaaacttcggacttattgcgattcctattaatatagcacatggcaaacctctattctgcctattggtcaacttggatatatctacgaaatgaacaaaatcgacccttgactttttcaattcattctctatttctttattcatatttctttctttttgacagggagataaatatctgtgattagttccgaaaccggagttttttcgggtgtattgatataagtctcaaaagtaaatggttctcgcaagctataatcatttgcaggtagccagtcaagataaatataacgatataccctattcagttcatggtatagtcctttaaaacggaatatagcatattcacccgcaggaacttcataaataccgaaccccttcggaattttaaatgattgtggtaatgttactccaaccataaaacgactttgttcttcagacgtgataaaaggataatcaagagtcaggctcacatacttacatccttttgataataattcatagctttcagaaaattgtagcacctgtttccataaaacagaaaagctatggctggcatgatgtgttctctctaattttaaatatgcaatccgtgtatgaggcactctttcaatacttggttcaatctgtattggattcttgccttcagaacaggcatttgaatgtcttttacgaaattcaggtatagagcaattaaagtagtttttgaatgcccttgaaagcgtatgtttattctgataattgatttgactaagaatctctgggacacttatattggtggatattaacttaaaagcaatgtactccaatcttaatcgttggatgtaattcccaaggctatcaccgcaaactgctttaaaaagtcggcggaaatgatacttggaaatgcatacaatttgggataacttttcagaatcaaggtcatcaaataaatgacagttgatatattcttgaactctgatcactaattcgtattgtatgtgagcggtattaattttttgcttccatcttttaatttcaggtaaccgtctggacataatttctctcaactccgacgaagtatggcgtatgccgacttctttatagtattcttcgggaaaaagtccccaaaggtagataagataatccattgagaagtcatacagtttaactccatttttcagacagtaatcacaatattcctcattttggtctgccttcagattggtataatcaatatccaaaggtattccgcaagtctggcaatattttgtttcagaattgatgttcataagttttttattattgagtgcaaagttaaccaatatgttatgcaaaaagttaccataaatagccttctttcgttttaatttgctttttattggttctgcatatctccccacgtaatttgaatgcgtttttgctctcatgctctaacaatttgtctgcatccctttattcatcgttgtttcaagtatggtagcaagtgtggtagcaggtatgagagcaaacgtttgctctcatacctgtcttgtgtctatgttgtcaattccatcctaattcttctcgtgcaaactgcaattattatcttcatcgcattcggtggttatttctgtatgtttcctcggaggcgttagtttcctcggaggaaatgccagtccctttaaaaggaacggtcgtttccattaaaaggaacgcccgttccctcaccgggaaacgacaggttccattataagaaatgataggaagcattaactcatttattgatcaataatacatgagttatcagtctttaatacctgatttctcaactattaatagcttaaaaatcaaacgttaatagttgacacatcagatattaacatcctgtataccaaaagataacattacaaaaacgatattaatcaagacgagatagagtgagagcaaccgtttgctctcatacttgccaccacgcttgctaccacccctaaaacatcgatgaataaagggatacagatgaatagttagagcatgagagcaaaactgttatctaattccttatggtgcgaacagaaaaaagagactctttttataagaaaaaaagagaaatcactgttatgtgagacactgtccacaaactattcgaaattctttcgataagtacatccatttctccattccgaacatccataagctgtcttccctttaatgatggttcccttaccacaaaccggacacggttgtccgacaaaagtatctgcattacctgtagccggagcagaggcaggagcagaaggaatcgaagcaggagacggagaagatgcaggaactttcgattctgctttcgccttcttttctttgggagcacttgctttacgctcacgcttcttaggttctttctttgccttttcttccgtttgggcaactgcctcctgaatagtgatacgtcggttcgtattatctgaaagtacgctcatcacgatttcagataccatttgcttcagttcttcgaggaattgacgggcatcgtaagtcttcttttcaatctcacgtagtttcttttcccatataccggtcagttccgcagatttcagcaattcttcgtggatgatctgtaccagttccactcccgtaggggtggctatcaggttctttctttccttgcggatatagtttcgcttgaacaacgtctcgataatggcggcacgggtagacggccggccgataccattctccttcagagcatcacggagttcgtcattatccaccaactttccggctgtttccatcgcacgaagcaatgttgcttccgtataaggtctgggcggttgcgtccacttctcattcaagtccggaacatgaggaccactttcccccttgacaaaagcaggaagtacattttcatcctcttcctctttttcttcggaagtatctttcacatctttggcaaaaacgacacgccatcccggctccagaatctgtttgccggttactttaaattctatcttgtccacttcgcccatcacggtagtggtagaaatcttacaatcgggatagaacaccgctataaaacgacgggctatcaggtcatagacacgacgttccatatccgtcagattctgtgcataaacgcctgtagggataatggcatggtgatctgttaccttcgaattatcaaatacctttttcgatttaggcaatgaagcacctgccaaaggagcagtcagcacctcatagtcccgaaggcctttcaatattccgggacacttcggataaatatcgtcactcaggaaagtggtatcgacacgcggataagtagccactttcttttcataaagcgactgaatcagcttcagcgtttcatcagcggaataggcaaacttcttattacactctacctgaagggaagtcaggtcgaacagacgcggagcatattcctttccatccttcttgccgacattggtgacaatgaacggaaggtcttttatgcgttccaccagcgcttctccctcctcccggttggcgatagggtcgatgccgggattgtctatcttcttctttccgccactcttttcttcttccgcagcaatttcttcatcgcttttacggatcagagcagaaaaggtggtatcacgataatttgttttcagttcccagtattgtttcggctggaagttggcgatctccagttggcggttgacaatcaatgccagcgtaggagtctgcacacggccgatggaaagcacttgtttgttctgaccgtatttgatagtataaagacgggtagcattcattcccagcaaccagtcgcccattgcacgggaaagtcccgcttcatacagtgattgaaagtcggactgatcctttagtttggcaaatccttcgcggatagcctcttctgtcagcgaagaaatccaaagacgtttcaccggacagcgggcacctgccttctgcatcacccaacgctggatcaattctccttcttggccggcatcaccgcagttgataatttcatctgcattctgcatcagtccctcgataatgtgaaactgcttttcgtaagtagggttctctatcagcttgatgccgaaccgtggtggaatcatcggtaagctacccaagttccatgatttccagttaggggtgtattcatgcggctctttcaaggtacaaagatgaccgaatgtccaggttacctggtatccgtttccttctatatacccttcttttcttgtatgagcgccgagtacttcggctatatcacgtgctacagacggcttttcggctatgcaaactatcattttttctcttcttgtttttatactaacagtctacaaagttacatgattatttctcactgaccgcataaagatgaaaaaaacatcccgccttcagcccgaatggagctataaggcgggataaaaaaaatagaaaaaatgattaaattccgtacttattcttcatccatcaggatttccagaatctggcaagcagccttcgctaccggagtaccgggaccgaaaatagcagctacacctgccttatacaggaagtcataatcctgtgcagggataacaccgccggcaattaccacgatatcttcacgacccagctttttcagttcttccatgatctgcggaatcaatgtcttgtgtccggcagccaatgaagaaacacctactacgtgaacgtcattttctacagcttcgcgggcagcttccgccggagtctggaacaatggtcccatgtctacgtcgaagccacagtctgcataaccggttgctaccactttggcaccacggtcgtgaccgtcctgtcccatcttcgcaaccataatacgaggttgacgtccctctttcttagcaaacttctcagccagttcacatgcacgcttgaagtcgccatcgtttttactttctgatgaatacacgcctgatattgttctaattattgctttataacgtcctacaaccttttcgcaagcataggagatttcacccagcgttgcacgaacacgagcagcttctacagccagttccagcaagttacccttaccggtctccacgcattcggtgatggctgccagtgctttgtccacttctgcctggttacgtccttctttcaaacgtttcaggttctcgatctgctcaagacgaactgccgtgttatcaatctcaaggatatcaatcggagcttctttttccaaacgatatttgttcacaccgacaatagtctgagaaccgctgtcgatacgggcctgcgtacgtgcggcagcctcttcgatacgcatcttaggaatacctgtctcgatagctttcgccataccacccagtttttctacttcctcgatacgttcccaagccttgtgagccagttcgttggtcagagcttctacgtagtaagaaccgccccatgggtcaacgttcttacagatataggtttcttcctgaatataaatctgagtattacgggcaatacgtgcggagaagtctgtcggaagggcaatagcctcatccagcgcattggtatgcaaagactgtgtatgtcccaaagcggcagccatggcttcgatacaagtacgtcctacgttattgaacgggtcttgttctgtcagcgaccagccggaagtctgagagtgtgtacgcaatgccagtgacttcggattcttcggattgaattgttttacaatcttagcccacaacatacgggcagcacgcatcttcgcgatttccatgaagtgattggtaccaatcgcccagaagaaagacagacggggagcgaacgcatcgatatcgatacctgccgctgttccggcacgcagatattccagaccgtcggccaatgtataagccagctcgatatctgccgtcgcacctgcttcctgcatgtggtaaccggagatagagatggagttgaacttaggcatcttctgcgaagtatattcgaaaatatcggaaataatcttcatagagaatgcaggcggatagatataggtattacgcaccatgaactctttcagaatatcattctggatagtaccggccatttcttcgagtttagcaccctgttccagacctgcattaatatagaatgccataatcggaagtaccgcaccgttcatcgtcatagacacggacatcttgctcaaaggaataccgtcgaacaaaactttcatgttttcgagtgaacagatagatacaccagccttacctacgtcacctaccacacgttcgtgatcggggtcataaccgcggtgagtagccaagtcaaatgctacggacaaacctttctgaccggaagccaggttacggcgatagaaagcatttgattcttcggcagtagagaatccggcgtactgacggatagtccaggggcgaagagtgtacatcactgaatacggaccacgcagataaggaggaagtccggcagcatagccgaggtgttccattccttcgaggtcctcttttgtataaacaggcttcacgtcaatgtgttccggtgtattccaatcagcggaaataccgttagccttttgccattcagcaccgttagcgggctgaaatgcagcatatatatctaagtttttaaaatcttttctcatcttacttcaatagtttggcgttaaactctttcaaggtatccaatacgttgacacgcacgtggatgaagttctcgatacctgctgctttcagttcatccatacaggcgggagcacctgctacgataaacatagcacggccgtccaatgctttgaaagccggcaccgcatattccgcatattcgtcatcgcttgaacagagaactacaatgtcagctttagcagccatagcagcttctactccggcttccaccgtttcgaatccgaggttgtcaataacttcatatccggcacaagcgaggaagttgcaagagtattgcgcacgtgcctgacgcatagccagattaccgatagtcagcatgaatgctttcggacgtttgccggaagcttccgtttcaagacgcaacgcctcaaattcgctggcagcacggtcaaataccaaagtatccacatctttctcgcaagtatgagcaccacctccgcagcagcatttagcttctatcggctgtttctcgcctgctttttcattgaagttcgggaactggttggtacccagtagcacttcacgacgttgagcaactgccttatgacgagccttgttgctttcgttcactgctgcctgaactgtaccggctttcagtgcagcatagaaaccgcctgcctcttctacggcaaggaagagttcccacgcttgtttagcgatagacactgtcaggttctcgatataataagaaccggcagccgggtctatcactttatcaaaatgagattcttctttcagtagcaactgctggttacgtgcaaggcgttcagagaattcatccggagtcgaataggtcttatcgaacggaacgactgtcattgaatccacacctgccaatgcagcactcatcgcttcagtctgtgtacgaagcaagttcacatgagcgtcaaacaaagtaagattgaaagtggaagtttcggcatgaaccgccatcttcgcagcacaacgacattctccattagcccccttattatcgcaatcacgcaagcattcaggatggtaagaagctacaatgtttgcccacagcatacgtgctgcacggaattttgcaatttcaaggaagtagttggaactgataccgaagttgaacttaattttcttggctactgtagcagcagggatacctgcgtctgtcagctggttcatgtattcattaccccatgccaatgcatagcccagttcctgagaaatgtaagctccggcattgttcagcgagattgcatttacattcagtacacgatagaaaggaagcggttggatagcttcgatcagggctttggcagtttgaaccatatcgcctttttctttaccgcgagtcagcatcttgttaaagaagtcataattgacagaacctctcagtttcttcacatcataatccttcttctggaaataagctaccagcagaccggccaattcaaccacatgtccctgacaagtagagaagttcagttctacacattcagcctgaatatcattcaacagtgtttcaatgtattccgcattgagttcctttgcttttacgtggaaagaaagtgagtcaacacctttgttcagaatatccagtgctttggcattggcttccttcgggcattctactttgatttcctgacgaaccaaccactcattattgttcttcttggttcctctcagataaggaaattctccgggaagtgcatctgtagttttcaaaccctccagatcttccatccggtagaaaggtttcactttgaacccttcgtttgtcttccaaacgagcttcttctcaaaatcagcacctttcaagtcggctgtaaccttctccatccattgttcggtggagacaggagaaaagtctgagaagagtttttcttttttgtctgccatagtttatttaaaattaaaacaagaattaatattgtctttatttttatttgtctctttctaaatgtcagtcgttcgacttgcaaatataattaataagttcgaacgattcttctttttagaaaaaattcgcactacaggttacagagagaaaatgaagaatgataaactaagaatgaagaatctccgtgcaacttaaggctaaacgaagcaaattcttcattcttcatttttagttctccttttatttgattagctccgatgtaatgagtaattttgcacccgtttttagaagaacattataaaaactactaatatttatggattggttacaaagtttattgtgggaccctagctctgtggcacacattgtattcctctacgcttttgtagtggcagccggtgtgtatctcggtaaaataaagatattcggagtatctttgggagtcacttttgttttgtttgccggcatcctaatgggacatttcggcttcacagccgatacacacatcctacatttcatccgtgaattcggattgatcttgttcgtattctgtatcggtcttcaggtggggccatcgttcttctcttctttcaaaaaggggggaatgacattgaacctgttggctgtaggcatcgtagtgttaaatattgctgttgcattggggctttattacctctggaacggtcgtgtggaattgccgatgatggtgggtatcctctatggagctgtgacgaacactccgggacttggtgccgccaatgaggccctgaaccagttgagctacaacggaccgcagattgcactgggttatgcctgtgcgtatccgctgggtgtggtaggtattatcggttctatcatcgctatccgttacatcttccgcgtcaatatgaccaaagaggaagagagcctgaaaactcagagcggagacgcgcaccacaagccgcatatgatgagccttgaggtacgcaatgagtctatcagcggaaaaacactgattgaaatcaaagaatttctgggacgtaagtttgtttgctcccgtatccgtcacgaaggacacgtaagtattccgaatcatgagacgatattcaatatgggcgaccagttgtttattgtttgttcggaagaagatgctcccgccatcaccgtatttatcggaaaagaagtggaactggactgggagaagcaagatcttccgatggtttcccgccgtattctggttactaaaccggaaattaacggaaaaacgctcggttccatgcacttccgtagtatgtatggtgtcaacgtgacccgtgtcaaccgttccggtatggacctgttcgctgatccgaacctgatattacaggtaggtgaccgcgtaatggtagtaggtcagcaagatgcggtagagcgtgtagctggtgttttgggtaaccaactgaaacgtttggacacaccgaatatcgttactatcttcgtaggtatcttcttaggtattcttttaggaagtctcccgattgcattccccggtatgccgactcctctgaaattaggtttggccggcggtccgctggtggtagctatcctgatcggacgtttcggacacaaacttcatttggtgacttacaccacaatgagtgccaacctgatgctgcgtgaaatcggtattgtgctattccttgccagtgtaggcatagatgcgggtgccaattttgtgcaaacagttgtagaaggcgacggcttactgtatgtaggctgtggtttcctgatcactgtcatcccgttgcttatcatcggtgcaattgcaagactatattataaggtaaactacttcactctgatgggattgatagccggtagtaatacggaccctcccgcattggcttatgccaatcaggtgacatccagtgatgcaccggcagtaggatattctactgtttatccattatctatgttccttcgtatcctaacgggacagatgatattactggcgatgatgtaaagcgaactaatttaattaataaataaagccgaccaaattcagaaagaatttagccggctttattattatcgggattttgttttctttttcaattacattccaatctgtagttttttagccacaaactcttccacaaaccgcaccgtctcctcaatccccaaagaagaggaatcaacacacaaatgataagtagccgctgctccccatgttttataactgtagtaattataatactccgaacgtctcttatccgctttttctatcatctcttccgccgcctcctcatcaatacgatgcatctgacacaaccgtgcgatacgatcttctttagtagccgagataaagacatttgcacaacggggatgttcccgtaaaatatagtcggcacaacgtccgacgaacacacaggatttctctgccgccagacgacggataacatcactctgcaccttaaataaagcatcattgctcagacagttggtacatggcattgccccttcactgatgaaaggaaaacgcataccgaacagtccgccgataatgccttgcgaggctttttcatcagctttttcgaagaactccttacataagccgctctcttcggaagccagattgatcagttccttatcataaaagtcgattcccaaacgggcagccaacttctctcctatttcttttccgccgctacctaactggcgaccgatattgataacataattaccgctcatagtacattttgttttatggtttgatagcaaacatacgacttttttctaaaagatgcaccattatacaaaagttatatttaaaagaaacaatcggaaagcatccttttttcatatatactctgccaataatacatctacatggcacaggagtccggctatcacccacctattttttcttcttgccccacttgggagttataccgataaagaactcgaagttaattcccggcatcggacgggataataccgaaagatactcttcgtcaaagagattattgactgtcccttttaaggataaatctgcccaacggagtgagaatcctttttcaagggtcacgttgctcatgagatagggtggaagatgtcccgtataggatacagcattactcgtcattgtataacgttcgctatagtaacaccatttataaagaagcccccaactgcgatatgtcagcctgcctgataacgtagctgaatattcgggtatgtatggtaactgcttccctactgactggtcagccttgctcgtaggttcaccttcattaatagaaggagtccacgcaaatgttccatttaatccaagcttccatgctttatcaattgcaactgcataatcagcctgtacttccacgccataggcgtgtacttttttaagattaacgggggaataaaatcccttcgacgtaggtagccaaataatccagtcgtttatatgttgatcgaaccaggaagccgaaccggataatgtataaacattatccttatccacagaaaaggacagccccgtttcgtaagtaaatccactttcattattcaatgccggattgccacccggcaaaaaataaaggtcattcaatgtcggaaaacgataattacgggtaatagaagcctttgccattatattgcctcttttagaaagaacataatctacaaaaaaggcaggaataaccggtgcccatttagtcccgaacatctctccccgcaggaccaatgacatacccaaccgattgaccggctgccatttcaatgagacattacccgacaactcaatacgtcctttatcaaaataaacaatagaatcattcttccttccctgaccatacttatcgttcttattatcatctttattcagatctttatccaaactattcaccaaatgctgatgagccgacacacccgccgtcaaaaggagtttatctgagaaaaaatactctccatccaactgcccgtagaaagtattgactttactacgtgaacgggtcattgtagccattataccatttcccaaatcccgcttatagtcgtacgccaaccatgtatgcacataacctccccttgccgatactttccagttttcacgcgtatgatcccatgataaaacacttcgcagtgtatgttcccgttgtcggttctcgaaatccataagatcaccctgatcggtcgtcagtaatgccagttcacggttagaatcagtataccacgcattcagtccgaagcgatcacctttacccgtattgtaatatacctcctgtaaaatgtgcagatctttgtatgcaccactacgattacgttctatgggataatactgttcgattatattatatttatcatcataaatattctctttcttatcatgattacgatatttataatcattgggcgacgactgatagaccgcccgcgtcgagatctgccaatgtttatctccatacttcaattgcagaaactcatcgaaggtactaaatgaaccgataccttgaacatattgcattccgaagccttcttgatgagcaggcactgtagataatttcaccaatcctcccaaaccaccaccagccatattcaccgatgaagtgccatgcagcaaagaagcgtcatctataaaataagatggaatcatcgaaaagtcagtcatccccaacattggattgttgatacgcataccgttccatgttacctgtgtatgcgaagcagacgttccccgaaatgatacagtagaaagcgtggcacgtccgtagctttttacaaaaatagaagaattgaaagtgagtatatccgccattgacaaggctatattctccttaagcacaagtgaatcaaatctggtctgctgtacgcctatatctttcatcgggcgctttcctaaaatttccacttcacgaatgacaattcccttttccgcccaattcttattgtcgctgctgtgttgttgtccactcattatagatggaagtaataaaagaactcctacaaactgcactaataatatatttctcctcatattcttctctaccgattacttccaacaaaatgctccgggaataatccctacataaaactcatccacaagttccccatctttcgtatagcgataaatcatcccctgttgctgatagtcaatagcatcagccacatagacatctccattcttcggactaaccgtcagaccataatacttcgtatcacgatacttgaggaaaggacgtacggggacacgctccgcatcaacagacatacgccaaatatctttgttaatccagtaaagttcatcacccgcaccattaagctgtacttccgaaggagcatctcccaactgaaacttaaattgtttctctatcttgaatgtttcggcatcaatgcaataaagcgatggctcctcatacccgtatggacttcctttataccctccatcagtaatcgtccacatcttgaagttcttatccataacgagagaagtaggttgtatacctacagtaagctgatctaccaccttgtccgttgtagtatctatctttaatatacgattctgataagaccagcaatttacatacacatatttgccatattgtaccatctgttctgttgagcctgtttccatcgtcatatccggacattcgatatatccggttatctgataagttttgggattgacaatgaaaatacgataatcccaaatctgtgtgacataggctttttcgtccgaaataaaatgaatgtagcgtggagaagtaagtcccgtaatgcgtcccacttccttaaatgtattaatatcaatggcaaaaatgacgtgagagttgtttactaccacccaaccgacatcattacgaatagtcattgactgtgctacatctcccaacttcatcgcattagcccgatagaatacttcattttctaccgttttcgtttccgggtcataataagataaggtagcattaccatactgaaagttcccttcattggtaatgaaaagaccgtctcccgtagctgagaaatcctccatctcaccataatcccatttcatacaaccgataaaagccgtcagacagaagacaataaataaaacagatagtaaaattcgtttcataattaaaagtgagaaaaggttattaactaacttgtcgcatcactcattagacatctgccagcaaattataatttgcgacaaacatcaaacatagcatttgtaccgaccggttgaatgaggaatcaattgaatataggaatgaactataccagttgatttctacccgaaacccgcgggtataaatctgcagcggcaaggcaggtcttctgactcgtccccgtttatcacgccttcccagtgatgtcaccagtggcaaagaatgtgataaactcatctcccgaaagagaggacttacagcagcaggtactgtcccggatttacaccggattcccttttcatcgttttggaaggttagacaattccaaatacgaaccttgcgggtgcaaagatactataattatatttcacgcctcacttctcccctgtcttttttatcaggaacaaaagattaaagacttcttcaaattagcacattatgagcaagcagatgaaaaagagaaaagtttgccctctgttccttcctatctttcggataaaaaccggatgactcatcaaaaagaggaggaatttctattttcacaaaagcggcttaatatcaaaaccatcaattttcaatcattttagcctagattacaagaatatgcaagcaacagcaaacaaaagaaactatatctacgatatttcatcataaactaagcatccatatcaaaagagcaaacagcacaaaaaagcataataacgtacaaaataagattgcttcttaaccgaattaacattgctttataagcaaactaagattggttttaaaccaaactgaccttcctttaaaaccaagcccgccttcctttaaaagaaaatcaacctacttggtcggcaaaagctgcatatataaccatttttcctgcataacggcctccgctttccgcatattcttgcatataagtaatccatttttctcctatttcaagtatttagcttctattttcccaatagaaaatcttaaaaacagaacatttggagatggtgtcactataccatcggcatagtgacactatcctgcaagtatggtgacactatcagagagagatagtgtcaccatatccaattcctcctttcccacccccgacaacgtaataaaaattaattagttaaaatagacatattatataaaaagataactatctttgcggtcaagaagttggttcttcgttgctataataagttgtatttcattcgattaagatataacaaaagctatcgaagattaaaagggaatgccgtgtgaatcggcaacagtatccgctgctgtattttcccgtactgcccttgaaggacagtacagtttgtagcaatttgtcactggaaattttctctgggaaggcgctgcaaataagggaataagtcagaagacctacctcctttcggttggattttactcctgcggcatacgggaggtagttcgttgtctttttccacaggcgcttaccatgtgcggacggaagaggcttcttctatatttatacttaccgggatactgactgcccagcgtaaaatccattatcattcctgtttgcaaactaactaaaagtatgcttatgataaatggatttttaaaaacaatcgctagcttattaatgctatgtactgtcgtgtctttcgcctcctgccggaacgacggtgatgatgaagaattgggtggcgggacaacaggtcaaccaccggtaattaccttcgacaacggtacgggaatctacacagtaaagattatgaaaagcatcacaatcactcccctagtgaacgatgccaccgatcctgtatatacatggaaagacgagaaaggtaaaatagtatgtacagacctctcatacacctattcacctaaagcggaaggagaagtctatttcaaattccgcgtggacgccaagaatggttatgccgaagaagaactgcgggtagatgtagtggaaaaaatgataccttccgtatcattgattcccgcctactctacctatatgggaaagagcgtaaccctcgaatcttccgtaaatttcactgaaggagcaaagtacgaatgggtgtccattgacgaaagcggtaaaaccaaagaaacggtcggaaccgaagctacctatacgtttacccccaccgaagaaggacaattcagtttcaaacttacggttaccaacgaagacggtagcgggaatgcgtcgacttccgtactggtatcacctgagccagtgatgaatataaccttcagcagtaatcaactaaccgtccccaaaggtcgtgctgcctgtatagctcccgtcattacggatacaacaacccatgcaacctacgtgtgggaagtagacgaagtaatgcaacagggagaaactggccccacttttaccttcactccaccaacagccggaagctatgtggtaaaagtaaccggaacagatggcgacataataaaaagtgctatccagaccgtagtctgcctgccgtctgatgaagccaaatactaccgcgcaccgtcagctggtagttcggacagtaaagtgaaagtataccacctacgccctgctccgggacaattcatagcacagatttccggacagaccgaagaagaagcctgtcgttacgctgagactcgcatgaatgtacaaaacaattatgtgtctctgggtgcatggggaggatatatcatcgtgggattcgaccacagcgtatacaacaaacccgatgtaaacggtaacggaggatacgatttctctattataggcaatcccttcgacggtagttccgaaccgggtatcgtctacgtcatgcaggacgaaaacggagacggactgcccaatgacacttggtacgaactacgtggcagcgaaaccggaaaggcggaaacctatcaacactatgccgtcacttactaccgcccgcctacacacaatatgcccctgcaatggatcgacaaccggggaaactccggctccatcgacctcaatcctaacttcccgctatggataaaggaaaacaactatactttatacggtacccgcctgaagcgaaatacaacccggacaccgggcggaatctggcgcaatgaatcctatccgtggggatatgcggacaactggggagaagacattctcgccgagggcgacaatcacgatgccgcacccgtaggcaacgccttcaagatagaaaacgccatgtatcccgacggcactccggtcaagttgcaatacatcgacttcatcaaggtgcagaccggcatacaatccgtagcgggagccatcggagagttgtccaccgaagtattcggcttcgtcgattataagatgagcgaagctccttcaaagatagattaataatcattcattataaattcacttaattttttagacaatgagaaaagtaaattactggaaaaccctgttagtggttttatgtaccggatgcatctttgcagcatgtggcgacgacgacgatgaaaacccgtttaccggagtagacaacaacttccttagtttttcactggaaagtaatgaaaacgtatggaaagcgacgattatagacaatgagatcaccgtaacggttcccgaaggaacttcgctcgatggcgcgcaagccagctatacccttagcgagcaggcaactgttaaccccaatccttcttccgttaccgcctggggcgaagagcaacaattcacagtaacttcctacaacggaactacgcgtacctataaatatacagtacgctactccgctgtaagtgaaatcggcacattcatacttaattcgcaagctgatgtagacgctttagccgaccaccatgtcacggttatcgaaggcagtctgagcatagctacagtagaaaatacagaagaccccgtgattaatctgaacggattggcaaagattaccgaagtaatggacgacatcactatcgggcaatactataaaggtgaaaaccttgccggactggctaaactggaaaaggtgggaagtatcagcatgagaaacaatagctcactgaccgagtttgcactcccaaacttgctttctatccgtggagaactattcatagcaaacccggcagaaaacaacatcacttctataaaatgcccgcaactaactacaattctaaaacaatgctatatccaagctcccaacctgaaaagcttaaatctcaattcgctcgaaagcattccgggaaaaggagataacagtgatggagatggtacattctctctttatggtagccagcttgtttcattagatttgccggtcttaaagcaggtaggaaaaaagttcactctatcgttgggaacaaaacatccggaactcacccaaattaatctaccggaacttatctcctgtaaagaagtatctattggttatgcagataagttagaaacaatcagtcttcccaaattatccactctttcttcttttagcattacttcttgtgccaaattttcgaagttgaacgaaaccattgcaccgtccaatttggaaaagctaagtgtatcacattgtccaagcgtaacggaattggatgcaagtcaaaaagacatcaacagtatttctatcacttatgttgacaataatttcgttctaaaaggaaaagaagaaatgggaagctatgcattcacaggatatcaactacccaaaacagaaggaatctctacttttgccagtctcacggttaccactccgcttactaatgtagaaatttccggtattaaacaagttacaggggaattaagtttccaagctacagcaaatgtgacattggagtcagtgagtatgcctgatttagaaactgtaggtaaattcgctactggaaatgacaataaaagatgcaactttcctaaacttacaagagtgactgaaaggttatatataaatatagaaaaaactgtaactgacctctcttatttaaattttaagagtttagagtctgtagagtttttagaaatgtatggcagcagaaataccaacataacatcacttgaagaccttttgcccaaattaaaatcgtcaaatcgtataagtattagactattcacagctctatacgattttagtctattcaaagatatagcagatgcaatgacagaagacgcccaatggtacgtacgtacttgtggtcccggaacagtaacattacaacagatgcaagaatcagcaaccggtgattttacaccggataattaatcacttaataaattacaattatgaaaaagagcatttttttcttagcagccagtgcaattatgtttgcaatgggcagttgtactaatgatgtgttggacaatgtccagcaagtagacagttcacttccgcagacacgtgctacagcgagtaatgactggacgtatgcgtatgtacttagcgaaggtacatggcatgtagctcctccctcatctccaggaaacattgttcgctatgataacaattggacgaaaaagtctaccctagaaattggagacacaggcaacgacttgattcaatacggatcaaaactctattgtgcagtaagtggtcacgaccttacagcagataatggaggaatatgggtactgaatgccaagaccggtcaacttctcacaccccaaatgaaacaatacgatgatgaaaaaaccgggcacaaagctatgccaagacacttggctgctgccaatggaaaagtatatatcagcttttattcaggggcagtgatgtctatcgacaccatgaattatgctaaagttaactacctagaactggatgcgacctattcagaaggtatctgcatcggcaaagacaacaaagtgtatgtctgcaattcaggcaatactgatgacccccaagctggtgaaggaacaactatttccgtattgccacttacccttgacgatgaaactcaaattaccgttcctaaaaatcctaagttgatagcagcttattcagccaataagatgtactttaacgtactgggtgacggaggtatgcactctgcattgtacaaattcaatccaactacacccaatgtagctccaacattagttacagaaaaagcaggtggatttgcaatcggcagtcaatatctttatacagcagatattgattggaacacaactgactataagactatcatgcaaaaagtacaattatcgaatgatgttaccagtgatttcacagatgatcccggatatatgttcggtttcagcgtaacagtcaatccgttcaacggagatgtatgcttcggtcaatcaatgggagacgcattgtatatttatgactccgcaggaggtgattacctagatatggtaaataccggcacagccaacgtgaacgctgtagtcttcgtcaaataactttccgcatcaatactgaaaagttagattcaatccattcacctcccagcgaaactttctcgtaagggaggtgatttttcttcttttttactacttttgtcctcagataaaaacatccgtatgaaatttaaatccattatttcaactatcacgctattatgcctcctttttttggcaagctgcgtatacaataaaaaaacttctttggaagcattcaagcaagacgtatacacgcccgaatatgctaccggattcaagatacttggcgcaaagaatgcccaaagcaccttgatacaagtatccaacccgtggcaaggagccaaaaatgtaacaatgtcctacttcatctcccgcaatggtgagctcccccccacaggattcaccggaccgaccatccctgccggagcccaacacatcgtatgtatgtcttcctcctacatcgccatgctcgacgcactgggacaagtggaccgcatcgtagccgtatccggcatcaactacatagccaatccctacatcctcgcccacaaagattctatcaaggacatgggccccgaaataaactacgaactattgctgggattgaaaccggacgtcgtactgctatatggcatcggtgatgcccagacagcagtaacagacaagctgaaagaactcgctatcccctatatgtatgtaggagaatatctggaagagtcaccgcttggcaaagccgaatggctggttgccctctccgaactgacagacagccgtgacaaaggcatcgatgtattcagggaaatccccaaacgctatcaggcactgaaagacctcaccgcatccgtagagcaacgccctaccgtgatgttcaacaccccgtggaacgacagctgggtgatgccttccacccaaagctatatggcacaactggtcactgacgcaggagccgactatatatataaggagaacacctccaacagctccgcccccatcggcctggaaactgcctacggactgatacaaaaagcagactattggatcaatgtaggcacggcatccacactggacgaactgaaaaacatgaatcccaagtttgccgatgccaaatctgttcgtgataaaactgtttataacaacaacctgcggataaccgccacaggaggcaatgactactgggaatcggcagtcgtacggcctgacgtcgtattgcgtgatctgattcatatctttcatcccgaacttatatccgactcaacctattattacagacacctggaatgaagcaacctcgtaggcacaccactcttttattcatcactctgggaataatcgccgtagtcttattattaatagatatggcgacaggggacacttatatccccatccccaaagtatgggccgtactgaccggaggcgaatgcgacgagatgacacgcaacattcttctctccatccgctttatacgggtagtagtagcagggttgataggtatcgccttgtcggtcagcggcctgcaaatgcagaccgttttccagaatccgttggcagacccttatctgctgggagtcagttccggtgcgggactcggagtggcgttgtttatattaggtgccccattgctaggctgggcagatttcccacttttgcaatccgccggcatcgtaggttcgggctggatagggaccgccgtcatcttgctgggcgtagccatcatcagccgaaaagtaaagaatatactgggcgtactgatcatgggagtcatgataggctacgtagcgggagccatcatccagatattgcagtatctaagttcggcggaacaactgaaaatgttcaccctgtggtcaatgggatcgctcagccacatcacagccggacagctgtctatcatgataccggttgtgtgcataggtctgctgctctccgtagcctgcatcaagtcactgaacctgctcttgcttggcgaaaactacgcacgcacgatgggcatgagcatcaaacgctcgcggacgcttgtcttcatctctacagcactgctgacaggaacagtcaccgccttttgcggccccgtaggattcatcggactggcagtgccgcacatcacccggctgctgtttgataacgccgaccaccggatactgatgccgggcaccatgctgacaggacttatcgccatgctgatatgcgacatcatcgccaagaaattcctgctgccggtgaattgtatcaccgcactgctgggagttccggttattttatgggtaataggtaaaaacttgcgtatattcaaatgattcaactcaaagacctgacactgggatacgaacagcgtacgctgctggaaaaagtctccgcccacatcacgggaggacaactcgtcgcactgctcggcagaaacggcacaggaaaaagtacactgctgcgtgccgtcatgggactggaaaagccccaaaacggagaaattatcctacacgggaacaacatcgcttcactgaaaccggaagaactggcacggaacatcagcttcgtcaccaccgacaaagtgcgcattgccaacctgcgatgcagagacgtcgtcgcactgggacgtgctccctataccaactggctcggtcagctgcaaggagaagacaaggagaaggtggacaacgccatgcacctggtaggcatggacagctatgcggaaaagacgatggacaaaatgtccgacggagaatgccaacgcatcatgatagcccgtgcccttgcacaggacactcctgtcatcctgctcgacgaacctaccgccttccttgacttgcccaaccgctacgaactctgtctgcttctccggaagctgacgcaaaaggaaggaaagtgtatcctgttttccacacacgacctggacatcgctctctcactttgcgacacaatcatgctgattgataatcctcaactctacagcctgcctaccaatgagatgataacgagcggacatatagaaagactgttccataatgagtcggtaacattcgacgcacaagccatgaaaataagaatcagataaatatcccatatcctgattaaacaaaaacaagcatgacaggcggaaattatcaaatgataattttaatctccttccatccatctacctttgcagatgttttcaacaaactaaaaataaaaagttatgaaagatagtattgatttcggtagtatggacatctccatgttgtttcgtaagttattagttcctacggtactgggaatggtattctcagctatattcgttattacagacggcatattcgtaggtaagggaataggcagtgacgccctagctgccgtcaatataacagctccactttttatgatcgcaacaggcatcggactgatgttcggagtcggaggctcagtagtcgcttccatctatctgtctcaaggtaaacgcaaggcggcaaatatcaacattactcaggctcttgtattctctacgttcatcgtattagtgatgtctgctttatgtttttgcttcgtagggccattgggatgcttactcggaagttcagacagattattgcctcttgtcatagaatatatgatctggtatctacccttcctcgtattctatgagttattgagcacaggcatgtttttcatccggctggacggatctcccaattatgccatgatgtgcaatgccatcgcagctatattcaatattatattcgactatattttcatctttgaatttggctggggaatgatgggtgctgcctttgccaccagcctgggaacagtagtaggtggattgatgactgtaatctatcttacgcggttctcccgcaacattcatttgcatcgcatcaagctaagtttgaaaagcctgatgctaacgctccgtaacggtggctatatgataaaactgggaacttccgctttcatcagtgaggcttccatcgcctgtatgatgtttttagggaattatgtctttatccatcatctcggagaagacggagtagctgcgttcagcattgcctgctacttcttccccatcatctttatggtgtacaatgccatcgcacaatccgcacagccgattatcagctataatttcggtgccgggcaaccggatcgggttcgaaaagccctgcatcttgccatccgtacagctttaatttgcggaatcagctttttcatcatcacgtttctatgccgtcagaatattgtttcgttgttcattgaccgaagctgtccggcctttgatattgcggtcaatggcattccttattttggggttggattcatattttttgccgccaatatgataggcatcggctattaccagagcatcggacgaggtcaacgagccaccatcatcactcttctgcggggagtggtattcatgctgatcggattctttgtacttccacttgttttaggagtaccgggaatatggttggctgttccgttggcagaattgttaacgactctctatattatcggaatttatttcaaagatcgcttcatggtccaccgactatgagtatatttgcaacatggatgcattcattaaaaaactctgcgacaaatataaagtattggaaagtgacgtacagaccttactaggctgtatggaggaagtacatttcaaaaagagagacctcattgtacgcgaagggacaaagaacagcaacctttattttataaaaacgggaatatggcgggcatattaccacaaagacggagcagatgccaccatctggttcgcttcagacggagaagtagctttctccgtctggggatatgcagacaatgcttattcactgattaatattgaagcaatgtgcgacagtgtagcctacagtatatcccgcacaaccttgaatcaattatatcattcttccatcggactagccaatctgggactgcggctgatggatcaccagcttcttctgcaagaaaactggctcatcaactccggcagtccacgagcgaaggaacgttacctgactcttatcaaggagactccggaactgttgcaatatgtgcctttaaagtacattgcatcttatctgtggataacaccgcagtcgctgagcaggattcgggcatccttataatcttcactttttttatgagtataagatcaaatatttctctcaaactcaagtgaataaataaaactgtccgcacgataatatcctatattccattccaacggacacccttcgggatcataaacaaaccttttacgcaccaaaattggatctccgacctttatctcaagcttaccagcaatgtacttgtcagccagcctggcactaatatcttctttagaaacttttgcaatagcatgataatctctttccaatatctcataaagaggtctggagaaatcctcacttcctgttaaacctattttaggattaaaataggatataaagtacacgaaagggtattcttgatttccacgtaaacgctctaacttcagtattctttttacatcaggagcattaaaaaaaagggctatatcatctgtaggctttgtccagctaacatgaagttcataattcattggtacaattcccaaagttttcatttcctgtgtgaaactcatccaattctgagctttggaacatacagctgaatttacaacaactgtacctactccctttttcctcatcagcaatccttcgttcacaaggttattaatcgcctgtctcaaggtattacgagatatgcccaattgtttagacaaatcaatttcatttggaagcattttaccttgtttatattcctcccctttgataatagtcctcaactgttcttctatctgaagataaagggggattgcgctgttatggttaactaatatcttcatgattaacttttttacaaagataaaaataaaaataaaaacaggcaatactttttgttcttttcaagaaaaagaatacatttgcaaatgtttatatgttcagacatactaattaattaaatcataataactatgaagtattatttgggaatagacataggtggtacacatataaaaggtggaatcgtcaaccttctaacgaatgacattcatcaaaacatactatctcacgaagaactgaatgccacagattcaacatcaagcatcattacgaaagtcagaaaagttattactgacattcaagcctgtatgcccctatctaaattaggcggaatcggtatagccatgcccggtccttgcgactatgccaaaggtatagttgccatttatggtgtgccaaagtttcagtcacttttcggtcttaaccttaaagaagaaattaaaaaagtatctgacctgaatactgttttcataaatgacgcatccgcttatgcccttggagagtattatgcaggagcagcaaaagacacaagtagaagcattatagtcacaatcggcaccggacttggaagtacatttcttgaaaatgatactgttttgaacgaactgacagaaggaatacctgaacatggatatctctacaacataccttaccgagacggaatggcagatgactttttttcgacaagatggtttgtaaatacatggaatatgctatttccagataaaaaggtaactggcgtaaaagaaatcgcactacgcgcttcgaacggagacaataatgcacagtcattatttgaaaacttcgcttcaaatttcgtagaattcataaccccattcctgctaaattttaaaccggagaaacttattataggaggaaatatagcgaaagcttctgacttctttttagataatattcagtttcaattaaagaaactcaatttaatcactaaaatagatatctgtaaattatgggatatgtcgccattaatcggatctgctatttacacaagcaacatacttgaaaatatggaaaatacaaaagagaaaagacacacacagcaatttattgcacctactaactctactgccaccccatcaggagaatatgatatatacccggcatttccattgggaaaaggcaaaattgggaaaggtataaaccaactagctgactggatagaaaagcattcccaaataaaaatagatggttatattggagtcttttgggatgaattaatcattaagttaggagaagaactcagaaaaagaggaaagaatgtgcgattctttcattccagtgtagcaatgaaagatccacagactattgaaaaaatgattgctccttatcttggaggagataatccgttattcggcaccattactgataagcatttggttaattggtttgatgaaaataagcttaattccatacaacctgacccggaagcagatttaaatatatttataggtacaggagcagccctatctcaatggaaagctcccctgatttatattgatattcctaaaaatgagattcagtttagaatgcgcgccggagccatcaataatttaggattagattatcgaaaagacaatcaacaggcttacaaacaactatattttgtagactggattgttcttaataagcacaaaaagcaatgcctgcctctgattgacctacttattgacggacaaagagaatgggatgaactattaatgatttcaggaaatgacctacgagaaggattgcacaaaatgagccgcaatttcttcagagttcgtccatggttcgagcctggcgcctggggaggacaatggatgaaaaatcatattcaaggattaaataaagaagtaaataatctggcatggtcttttgaactgatggtacttgaaaacggactaatgctggagagtgacggatatcggcttgaagtatctttcgattttcttatgtatagtgattatcagaatatattaggagaatgttcggaaacatttaagtacgatttcccgatacgtttcgactttctagacacctttgacggagataatctttctatccaatgccatccacgcccccgatatatacaagagcattttaacatgccattcacccaagatgagacatattacatattggattgtaaaaactcgccatgtgtatatttaggctttcaagacaacatcgtccctgaggaattccaatataccttggaacgaagtcaacaaaaagcaacgaaggtagagatagaaaggtttgttcaaaaacaccaagctaaaaagcacgatttctttcttattcccaatggcaccatacatgcttcaggaaaagattgcgtggtattggaaataagtagcgcaccctatattttcacatttaaaatgtacgactggatacgcatgggattagacgggaaaccacgacctctaaacattcaacacggaatgaataatctatattttgaaagaaaaggggaaaaagtaatccaggaattgatatgccatccatatatcatgaaagaaaatcaggagtgtactatagagcatctacctactcataaagagcatttttatgatgtatatcgttacaccttcaaagaccgtattcaaatgaatacagaaaatacatgccatgtatgtatgatagtagaaggagactccgtttgcattgaaacagaggacggcatgaaacaacgctttaattatgcagagacttttgtcatccctgctgctgcccgatcatatacaatcataaatgaaaatcccgacaaaagaataatgttggtaaaagcctttgtaaaaaaagaagttactttgaaataatgtcttaataaaaacatcttatccaactactatgaaacgaactattgtacaaattatctttttcatatattgtattgcgaatgtatatccacaatacagcacaatctggcaacttggcaaaacagataattcatccaaggagtttgccttagcaccggatggaaaagatcgatttattatctccggatttggggataataaaaaatatttttatgcaggcgaacacacaccggccgattttccatacattataccggggcctactgctgaatgggctggctcatcttactgggcaggacaatgcaggatacaacttcctattttaataaaactatccgatgtcaatccgctaaagaaatatcaatggaatatttttatagagaatgtagaatacgaagactgtatgttcttaagactggaagtcaacggaaagaattacgattctcctataaagcctggcaccaaacagctaacatattcaatacagcccggaattctaaaggaagggtacaacaagattgtaatgcagttattcaacggtaaatccctaacttttgacgccatttgcctaaacggacctcaagagacacaaatcaataagataggtgatactcctattatttcaatgaaaatggctgattatgaattagaacaagggaaaacaagaacacagcctcttctactgaaaactataactaaaaaatccggaacacttaaaatacaaatcaaccaaaagaagatattcaaacaagtagaagaaggagagaatatctacgaaattccaaccggaaaacttaaagaccagtctaaaatcaaagttaaaatatcaacagaaggacaaacagtagcaactcaagaatttatccgtagtaaccagcaactacgcagatcaattgattatgttgatcagtttgctggttccagtggttcacgatggatgataggccccggaccatggatgccatttggaatggtaaaacttatgcccgataacgaagatgcccattggaaagcaggatatgaatataacgttgaaaacataatgggattcagccacattcacgaatggacaatgacaggactcttaatgatgccaactacgggagatttaaaaatacaacccggaacagaaaaacagccggactatgggtatcgctcccgaattaataagaaaaccgaaacagcccgaatcggttattattctgttaatcttacagattataatatccaagcagaattaacagcaactacccgcagttcccttcagcgatacacattcaacaaagcagagcagccacgaatactagttgactttttctttccagcagaatacgactggaatttagatgatgtatacgtaaaaaaagtatctgacacagaaatagagggatggaccttgaacgattgccggtcaacaggataccatggagtacaaagatataaattacattttgtcatgcagtttgataagccattcaaaacaatgaatggctggatacgaaacaaagtatatagccaaattgaacagctacataaatcaaacatgaagtcccgacaggtatttacagtcgaaaataacagtcaagacaaactggacgcaggaatcttcctcgactttaaccttaacactggtgatgatgttatggtaaggacaggtatttcattagtaagcattgataacgcacggctaaatctggaagaagaaatagcgagaccattcggatggaattttgataaagttgtcaccaatcaacaagatacctgggaaacacttttccaaagagtcagtatcacaacagacaattacctcttaaagcaaaaattctacaccaatctttaccgttctatcagtccacggaccatctggaatgatgtaaatggggaatggatagatatgaacggtaacaaagctcttatagacaagccaggtaaaagcgtatatggaggtgattctgcttggggaatgcattggacattaggtccattttataatcttctctatccggagtacatgtccaattggatttacacttacgagcagttctatcgtcgtggcggctggcttcccaatggtaatcccggtatgaaatatttcagagtcatgataggcaatcctgctttgccattgatagtctccggctatcaacatggaattcgtgacttcgacagtcaactcatgtatcgggcattaattcaccaacaaacagccactatgataaactatcccggaggaggacaagtcggtaacgaaagttatcccgattatataaccaaaggttatgtacctctatacgatgacgcatgggattggaattctccgcattatcaatcatacgtttccaatacaatggaatactcatatcaagactattgcgctgctcaatattttgacgctcttaataaaaaagatgacttcaatacatttatgaaacgttctgataactggaaaaacatattcgacccatcaaccggatatgtacgcccccgacgtcccaacggagagtggatcgaaaacaccaacccatatcatgctcccggattttgcgaaggcagcgcttggcaattcacctggtacgttcctcatgatgtaaaaagcctcatcaatttaataggagagcgtcaattcatcgaccggctgaatgccggatttgcaacatccgaaaaagtaagcttcaatgctttaggagataatatgggagcttatcctattaatcatgggaatgaaacaaatatgcaggcagcttacctcttctcttataccagtgagccgtggcacacccagaaatgggcacgtgctatacaagaaaaatattatggaatgggtccccgagacgcctatccgggagacgaagatcaaggccaaatgagttcttggtacatcttaagcagcataggacttttccaaatggatggcggttgcagcaaagatcctgtatggttactggggagtccgcgatttgaccgggtagaaattctgttagacaacacctattactctggaaaaaaacttatcataaaagcagaaaatgtatccaaagacaattgttacattcaatatgtaagattcaataacaagcgccttagtaataactatatagaatggagtaaactcaaaaaaggaggaacacttcatttcattatgggtgaccgaccaaatccaaatgcatttaaataaataaacacatatgaaaaataaaagtaagatactaccagttctttttggtttctttattatggggttctgtgacttagtaggagtatcagtcacctatgcgaaagattatttcagttggagcgaaacccaagccggtttcctgccatcaatggtatttatatggtttttactcatctctattccgatttctatctggatggacaagaaaggtagaaaaacaatatcactgataggacttttatctacttttattggaatgttacttccattacttacattcacacagacagcctgttatatcgcctttgcacttttaggcataggaaataccatccttcaagtgtcacttaatcctttattaaccaatgttatcgctgaaggaaaattatcaagcattatgacagccggacaattcatcaaagcactatcttcttttgtaggacctatagtggccggattctgctctgtttatttcaacaactggatattaatgtttcccatattcgccgccattactctaatttccggaatctggttatttttcactccaataaatgagaaagacgacaaaagattaacatccagtttctatcaagttatttctctcctgaaaaataaaaccatctgccttttattcggaggcatcatttgtattgttggcttagatgtaggaatgaatgtatttaccccaaaacttttaattgaaaatgcagagttgactaaagaaatcgcaagttatggtacaagctggtattttgccgctcgcactttggggaccttatgtggtgtaattctattagcaaagttttccgaaatttattattatcggatcaatatgttcattgtattaatagctttgtcctgcatttattggatacattctcaatatattattttgttattagtatgcattatagcctttgcaatgtctagcatatttgccgtcatctactcgctagccttgcatacattaccctataaaaccaacgaaatatcaggactcatgataactgggatatccggtggctccatcattcctcctctcatgggagtttgcgcagattataccgaaagccaatcaggctccatccttgtcatgctaatttgtgtaatctatctaattttatgttcgtttcataaatttaaaaccatacacacaaagccgcattaacatttattctcaaaacaaccattcatatataaatttatattaaataaataaatctttctagttttcctgctttaaatatatatatttgcaatatgtatatacatataaacattatataatacatatatcataagcaattaatactatgtagattaaaatatacagcctttatatacaagaaatcacattaaatctaatataaaacccttatgacttactttttaaaatcacagagtatgaagaagcttttatgcaacttaccacgcttcgtattatggatagctttccttctaatcattgaaagctatgtaaccttgcaagctcaaaccagtagtagtaacaactcatccaaagcaatatcagggaaaattgtggatgaaacagatttgcctattgcaggagctactgtacaggtgaaaggatcaacaaaaggagccatttcggatatagatggcttatttactatttcatccgaaccaggctctattttgattttctcatttttaggataccaatctattgaatacaagatagataaagtacctcaaaccattaaacttttgccaaaggtagatgaattggatgaagttactgtggttggttttgctaaacagaaaaaagaaagtgtgattggagcaatatcaaccttaaaacctgaaagattaaaaattccaaccagtaatctgactcaagccttaggtggtaatgttgccggaattatatcttaccagttgtccggtgaacctggaaatgacaatgtggaattctttattcgcggtgtgacaacttttggttactctaaaagtccactgatattaatcgataatatcgaatcatctactactgatctttccagactgtccgcagatgacattgctgctttctctataatgaaagatgcaacagcaactgccatttatggtgcacgcggagctaatggagtcattttgattactaccaagcaaggcaaacccggtaaggtaaaaattagtgccagagtggaaggttcattgtcagcacctacaaaaagaatagacatggtagatcctatcagctatatgaaataccacaatgaagctgtactcacacgtaatccgttagctgtccggcctcataccgatgagaaaatagcatcaacaatagccggcaaaaatccctatgtatatccggcggtagactggtacaatgaattatttaatgataatgtatttaattcacgtgccaacatcaatatgagcggaggtagtgaaactgccagatattatgtttctttaggcatatcggatgacaatggtatcatgaaggtagataaacgaaacaattataacagtaacattgatttaaaaaaaatctatgtacgttctaacattgatattgatgtgaccaagacgactacattttctgtaaaattcagtggcaattttgatgattataccggtcctattgtaagcggcaatgatctataccgaagagcaatggcaacaagtcctgttttattccccaaatattatatgcctgatgaaaatcatacatctacttcacatattttatttggtaacgcaggtgatggtaattacatcaatccctatgcggaaatgatacgtggttacaaacaatacaccaattcggttatttctgcccaggcggaattaaatcagaaattagattttataactccaggacttagtatcaaagtcttcgcaagtactacccgaaattcatacagcggacaacaacgttctacttcacccttttattattcaatcagctattatgataaactaaccgacacatatactttaagggagctgaaccctaatggtggacgggaagatttggattatacagcagaagggaatcaagtcagcagttcgtattattatgaagcatctctcaactacaaccgtacgttccgggaaaagcataatatcaccggattattagtaggagttctgagagagaataagagcggaggcgcaagttcgatacagacatctttaccagcccgtaacattggattatcaggtcgttttacatacgcatacgacggacgatattttgctgaagcaaactttggttacaatggttccgaaagatttgccaaaaatgaacgattcggactctttccttcgataggagcaggctggatgatctccgaagaaaagttttggaatcaagaccttaagaatattatcaataaactgaaactaaaaggaacttacggtttggtaggtaacgacaatattggtgcatggaatgacagattcttttatatgtccgaggtaaatctaaacggtagtggtgcaaatttcagttggggacaagattttgaacggaatgtcggtactatcgacatgatacgctatcgaaatgacaaaatcaaatgggaaattgctcaaaaaatgaatttaggtctcgaagttgggctatttaatatatttgacatacaattcgattacttcaccgaatatcgaaaaaacatctttggcgaacgccaaaccatcccgtatgaaatgggattcagtgcacctctttatgctaataaaggagaagcttcttcacatggattcgaagtgcaggtagatgccaaccacgctttcaataaaaacttctggttaggagtgcgtggcaatttcacttatgcaacaggcaaatatgagcatgtagaagaaccctatcgtccttacccttggcttagtcatattggaaaacgtattaatcagacttatggattaatagcggaaagactgttcattgatgaagaagatattgcaaattcacctgttcagacatatggtgaatatatgcccggtgacataaaatacaaagatgtaaataatgacggaataattaatgatgaagatattgttccaatagggatttcctcttctccagaaattgtatacggcttcggagtgtcgatgggatacaagaattttgatatttcttgtttctttcaaggagcagcgagatcttctttctttattaattccaaagcaacaaatcctttcatgcaaatggatttcggaggaaataacctcaatggtatgatgcaagcatatgcggatgattactggtctgaatcgaatcgtaatatatacgctactttcccaagattgtcaactactgacattgcaaacaataacagaaacagtacatggtggttacgcgacggttcttacttgcgtttaaaatcagtcgaaatcggatatacattacctaaaaggctgaccagccatctaggtatgtccaatttgagaatctatgccagcggactaaatcttttcgcatggaatcgttttaaattatgggatgtagaacaaggaaacgacggaatgcaatatcctattcaggcagtttacaattttggtattaacttaagcttctgattacattatgaaatacaaacatttattcactagtacattattggcgatattaatcacatcctgcaactatcttgatatcgtgccggataatatcgcaacgcttgaaatggcattcaacactcgggctaatgctgaaaaatatttagccacctgctataacttcgtacctacagcagccaatcttgatcacaactccggcctcatctgcggtggagaaatgtggtatctgaaaccagagtcccactactataaaaatataacctcattcaacattgcacgtggtatgcaaaactctaacgaccccttactaaattactgggatggaggtcagggaggctacaacatattcagaggaatccatgaatgcaatatttttatagacaacatcgatcgcgtacctgacatgcgtatggaagagaaaaataaatggaaagccgaagtgatgactctgaaagcatattatatttattatctcatgttgcactatgggcccattcctttacttaaagagaacatcagcgtagaagcagacttagatatgatgcaactggagagagaaacgattaatgatatcgtcacttatacaactgatttattggatgaagccatgaacatcccttccggattaacattcaatgtgacttctccacgcacggaattagggcgtatcacattacctattgcgaaagcaatcaaggctaaattactaatactggctgccagtcctttattcaacggcaatacgatgtatgctgaatttgtcaattcagaagggatacctttcttcgaccaagagtataaaaaggaaaaatgggaggcggcagccgcagcgtgcctggatgccatcaacactgcccacgaagccggagcttctttatacaaatttgatgagaagctaaattatactccttcatcaactttacaacaagagttgacactacgtaacacaattaccggtcgttttaattctgaaataatatgggcattaggttccaatgcaacagatggaatacagaatctatgccaagcgcatttaaccagctattcattggggaacagaatgattcgtagttgctcacaacttgtgccgtcattagaaattgtagaacaatactatacagcgaacggagtcccgatggatgaggataaagattatgaatatgaaaacagatataaactgacaacaactccagaagatgatcctattcattttacaccaaactacacaactatcaagatgcatttaaacagagagcctcgtttttatgcctatattggttttgatggtggaaaatggttctccatcgaatgctgtaacgacaatgaaacgagctcctatcctatcaaatcaaagaaaggagatattgccggcgtttcagacgaactatattcaccgacaggttatttcacaaagaaattggttagttatcaaaacgtaaacaccagtgcgaccaatatcaattacgtatattctttcccgattattcgcctgtccgatctatacctgctatatgcagaagctctcaacgagcttaatgaaactccgactacagatgtatactactatgtacaacaggtcaggaataaagccggtctggatgaaggaggttctttggtaaatacatggcgtaatcattccaaccgcccggataagccaaccacccaaagaggaatgcgtgaaattatacagaaagagcgaatgatagagcttgcattcgaaggccatcgttaccatgatgtacgcagatggaagttaggctctacatatctgaatactcagataaaaggctggtcggtattagagcaggacccggagtacttttataatgcacgagttctcttcacgagaaaattcatgccaagagattatttatggcctattaagaccaattctatcaacagaaatccgaaacttgttcagaatcctcaatggtaacttttaacataaaaatgacaaagatgaaaaatatagcttttatacttttaatacttgcagcagtttgttttgcaaactgcgccggtgattacgaggccgaaccacgcggtacgaatgatggaaaagctccggcaccgattactaatatatcggtgaagaatgtaaacggaggagctattattaaatatactccttccgatgatgtcgatttattatacgtcaaagctatcttcactaatacccgcggagaacagcaggaagtaagatcttccatgtatgtagattctttggtaatagaagggctgggggatacacaaaagagagaggtcaaactttactctgtagaccgccacgaaaactattccacaccggctatcgtgactattgagcctctgactcctgcagtcgttcagacacaagaatcattaaaagtgactgaaagttttggaggtttcttcctcgatttcaataatgcagcaagaagtgcattatctttctacatttacaaatgggtagatgagcacaatgaatacgagatccatgacgtatactcctcacaacaggaagaaggccgcctgactataaaaggcttagaacataaattattgaaattagccatcttcgttagggataaatgggaaaacacttccgacacattgtatgccgaaattactccttggaaagaaagcttattagataaaacaaaattccaacttgtcaaagttatggatgatgtcagctgggattaccacgaaggttatcattcccgtctatgggacgggcaaataggtggatggaactggggacataccgaatacccgatacctttcccgcatgccttcagtattgatttgaatgtcaatgtacgtctcagccaattccaattctggcaacgtctggacagccaagacttattatatgcccatggagctcccaagtacttcaaattatatggctgcgaagagggtaaagatttgcagaatccggataactgggtggtattatttgatggagaaatgaagaaaccatccggcggggcatttggtgatgcgcttactcaggaagatattgaggaagcccaaagaggccatgtatttaccctcaaccaagatgtaccattcattcgctacttccggttccagagtttaatgtcatggtcgggaatggaaacatcagttatgtcagaaatcactctttggggagatatccaaggtgaagaataaccttataaaatagacagaaatgaaaaaagtaatatatataataactactattctcctgtgtatgacctcctgcacagatattcatgatacctattctgaatatatcaaagacggagaacaaatttatgtaggaaagctggcggatgtaaaaatacatccgggatttcagcgtatgatgataacggggtctatgaaatatctagccacagcaaagacttgcataatagaacttgtaggttacgacaaggttttcacaacagacattgacagaacgcaacctgaattcagttatgaaatcaaagatgtggaagaaggcaactattacgttaaaataaccacaaaggataaagaaggtaatacctcactatccgaaacctacaatgtagatgtatacggaacggagcacatagcgacttattatcccaagcgaattaccgatatacaattcgtcattgccgacaactcgctcaacttaatttggaatcaggcagacaatgtggtggaagcaatagttaagtactatgattcaaatgagcaactactaactttaacagtgaaaggagatgctgcttcaaccaatttacctgattggaaagctacttctatattaacagtagaaacacgaatcctacccagcgaaacagcattggatatcgtatccctgcccatttcagaatacactttgcccgacgatccgattgtagaaatccccagaactaactttgccaacgcaaatatgccttcagatgttgtaaacggttatggcggttcagtagaaaagttatggaacaatgatacatggaattatgacagcggttatcatgccggcgataatcaaggagttcctcatcatctgaccattgacatgggacttacagcaacgattaccgaatgcgaactgttctttaccggatatgaaagaacagactggatgcctcgattattccaaatatggggaattgaagatgtagaagacctggaaagccatgaaccggatgttccatctataaacccggcttgggaagaaagtgcgaaagcaaaaggatggaaacagctgactacaaaaaacatttctgtttccggttggcaacccagtattaagttcgcctgcgataaagaacacgaaaatataagatacatcagataccgtattgtagaatcactctcagctccacacgtaggaatgggggcctatggttccgccagcgaaatcaagttctggggtaaaaaggttagtttgttacagtgataacagttgaatttgtttttgcataggagtgtatacaaaaaaagaatgatacattcctatgtaaaaaacaaatttgtatcttgaatccaaaagaccgaaagttaatatgaaaagaataccattgagtttattcacgtttttattcctcctatccggattatgtgcagcacctaccaagactgtctggcaaatcggggagaaaaatcatagtgccagtgagttggcattgtcccctgacaaatacaaagagtttctggcaaatgattttggttgggaggacaggttttatatcattggattgtcttcccctcaaaaagattttccttatgttctgccgggacctgccgatcattggggaggaacaagttatactgccggtatacggactcatgttttaaacatactctttggtatgaaggaagttcccgaaacggactcatggaaattaatcatagacctattagatactcaccacgaatttccggcactatttaaaataacgatcaacggaaaatcatggaaatatgcacttcccaaaggaagtggaaaatcaatagacggtgactattcacaaatcaaaccgcatacgatcgaaattcctctgaactccggagtgatcagaaaaggaagcaactccatcgcgcttacaagtctcgaaggctcatggattctcttcgatgatatcagacttatggggccggataatgctgaactaaatgaagtcaacaaatccgtttatctccgggatgttaaagctgcggactttcaaaccaccagtcctgtagcccaaccactattagtagacatagaacatctttccgggcatcctctccttgaagtgaaagtagatggaaaaaagatactggaacaacgtttggaaaaaggaagatacatactagaagctccgatgccagttgtcaagtctcccaagacaagccattacatcatatccgccgatggtgcaatcttagataaaggaatgatcagacgcgcacctcacaatacaatcacactggccgattacatcgatacacgaatgggaactgcgcactcccgttggatgatagcaccaggtccgtggatgccattcagcatggtcaaattaagtccggacaatcaggatagcggttggcaatcgggatatgatccttcattcgagagcataggtacgtttagccacatacacgaatggaccatggcgggtctgggcatcatgcctgccaacggtcctttaaaaacggagataggcagccagtcttccttagtcaaagatgccaattcgtatcgttcagccatcgacaaaacaagtgaagaaacgaaagtcggatattataaagtagacttgaccgattatcaaatcaaggcggaactgactgccacctcccggtgtggttttcagcgttatacatatccgcaagataaggatgcccgtgtcatgatcgacctgaaaatccctagtgaatacgattaccaaattgttgaaggaagtataaagcaaacaggagcacgacggatcgaaggattcagcaagcagctatccaaaaatgtatggtcggcggatgcggatcagaactatacaatttatttcgtgattgaattcaataaagatatcaagaaatttggaggatggcacgatcatactttatgggaaacagatactatgacagccagctaccctcagcgattcggctgttatgccgaatttgatactaccgatcatccggaagttatggtacgttccggaatatcttatgtagatatggcaggggcttccaacaatctttccaatgagataatggaaccattcgggtggaattttgaagctgtacgcaaacatcagtcggatagttggaataatattttaaacagagtccggatatacagcaacgattatcgggaaaaggtaagattttacaccaatttataccgtgctttctgccggaatactttcagtgatgcagaccgcagatgggtggatgcagcaggcaacattcaaaagctggacgacccggatgctgtcgctttgggatgcgatgccttctggaatactttttggaatctgaatcaggtatggaatctgattgctcccgagtggtcatccagatgggtaaaatcgcagttggctatgtatgacgccaacggatggctggcaaaaggccccagcggaatgaaatacatacctgtaatggtggccgaacatgagattccccttttagtaagtacttaccaaatgggaatacggaattacgatgcagaaaaaatgttccgggcaatcgtaaagatgcaaactaccccagctcaacgtgtagccaatgggtttgccggcaacagagatttggaaacttatctgcaacatcaatatgtacctgccgacaaaggacgtttttctaacacattagaatactcttatgacgactggacagtctctcaactagcaaaagcactgggaaaagaggaatattaccgaacattctccaacagaggcaactggtggaaaaacgcaatcaacccggcgacaggttatgcccaaatgcgctacagcaatggagaatgggaaaagaactttgatccgttcaaatcaggagctaaccatcattatgtagagggaaacgcctggcaacttactttttttgtacctcagaacgttcccgcactcaccgaaattatcggtaaagagctcttcatcgaccggctgtcatggggattcaaagccagtgagccatggaggtataatgccccgggagaccagtattgggactttccagtagtacaaggtaaccagcaatccatgcacttcgcctttctattcaactgggcaggccaaccgtggcaaacgcaacggtggagccgttccattatcgaccgctattatggctttgacacatcaaatgcctatttgggagacgaagaccaaggacaaatgagcgcttggtttgtcatggctgcattgggattattccagacggacggaggttgtaacgcagaacctgtttatgaactggggagtcctctgtttgaaaaaataaaaatagatttgggaaaacatttcggtagaggaaagcaatttatcatcaaagctagcaatacttcgcgggaaaataagtacatccagtccgccaaactaaacggcaagaagttgaactctttcaagtttccggcaaaagaactgctcaaaggcggcacattggaacttgaaatgggagatcgtccgaataaaaattggggaatcaaataacatcataaaaaaaatagtaacaaatgaaaaagatcttactcagtcttatcacagcagccgttttattatcatgtcagtcatcacatgacacatcacacaagtatacagccatcactccgggagtagaatggctcgacaccaacaacgagaaaataaatgctcacggaggcggtatattatatcacgagggaatttactactggtatggcgaatgtaaaagtgattccacttactggaatcccaatgttcccggttgggaatgttatcgtacggaagccggtggagtaaattgttactcttccaaggaccttctcaactggaaatatgaaggactcgttctccaaccggaaatgtctgacacacaatccgatctccatccttccaaagtgctggagagacctaaagttatatacaatgacaaaaccaagaaatttgtaatgtggctgcacgtggacagtgacgactacaataaagctgctgccggagtcgctgtttccgattcaccgactggtgttttcacctatctgggttcgatgcacccgaacgggcaaatcagccgggacatgaccctattcaaagatgacgacggcaaagcttatcatatctactcttccgaacagaattctacattatatatcagtttgctgtccgacgattacctgaaaccttccggcactttcacacgcaatttcgcaggtaaattccgggaagcccctgctgtgttcaaacacaacggactatactacgtcatcagttcgggatgtaccggctggagtcccaatgaagcggaatatgcagtggctacccaaattttaggaccatggaccgtaaaaggaaatccttgtgtaggaaaagatgccgacaaaaccttctatggacaaagtacccatgtactgccgattcaaggaaagaaagacgcatacatagccatgtttgacaaatggaataaaacagacctaattcactcaacctatatctggttgcctatacagttccgtgaagacggaagcatggctattcaatggctggatagctggtcacctgatacatacgaattctaattaagatatagcaacggcatatcattttctaaaaggaactcacatgagaaagataaaaattaaagaaatcgtttgtatcatcggattgttgggaactctcacagctcattctcaaaatacagtctggcaaataggaaacaaagataaatccgccaaagagttcaagttctataaaaacgattatcggaactacatcaatgatgtttatctatacgaagtagggagaaatcattctgctgattttccttactttctgccggggcctagtgatgcctgggcaggtggcatatcagggcaggctgttattggcttttcattggccgaagctccttctccgacaacccaaatacaactacgacttctatttgcagaaactcatccttcctcacctccccgactggaggtgaggctcaacagcttcgagaaatccatccaaacacccaaaggcacaaaccctgaatatctggacacaaaagaaacaacttcaaaagagttatccgtcacgcttgacattccggctgatgagttcagagcaggaaacaacacactcacgatccgaaatatatcaggcagttgggtagcattcgaccagataaagctgacatctgactctcctctgcaaacaaacaatcttacgaccaaagccagtctcgtatcttccgccttctctcctgtattggtggtcggaaagaaaaaagaactgagacagccggtcaaaataaaagcagtcaactggcatcataaaaagagaccggtggaactgcaagtcggtaatttcccaccggaaagatacgtattgtcccccggaataaataacattgagacatccattccggaagtcaccgctccatgtgagttaccgatcatactgaaagaacaaggaaaaaccgtcagcaaaatcaatgaaaaggcaactcctgtcaagaaatggacagtatatctcgttcagcatactcacacagatataggctacaccaaacctcaaaccgaaatcctgtcggaacatctccggtatatagattatgccattgaatactgcgaacaaacaaaagactacacagatgatgcgaagttcagatggacctgcgaatcggcgtgggctgtagacgagtatttgaaaaacagaccggaagaacaagtgaacaaactaaaaaaatacattgccgaaggacaaatagaagttgcatccatgtatttcaatatgtcggagattgtagacgaaaactctttcaagactttccttcagcctgtcaaagaattcagaaaacatggaattccctctgcgctggccatgcagaatgacgtcaacggaattgcatggtgtctggcagattatctgccggacctcgggataaaatacctgtggatgggagaacaccattacaaatcgcaggttccgtttaatatgccgactgtcttccaatgggaatctccgtcaggtaaaccgatcctgacttaccgtgccgaccattataataccggcaatttctggggaatagagcagggagacattcaaaagacagaaccgaagttactacattatttatcagaactggagcgtaagcattatccgtttgatgcagtaggcgtacaatactccggttatttcacggataattcaccgccctccatcattgaatgcaaactcatcagagagtggaatgaaaagtacgcatatcctaagctacgaagtgccactgcatccgaatttctggattatgtaacgaagcgatacgaggataaaattcccgcatacagagccgcatatccagactggtggacagacggtttcggttctgccgcaagagaaacagcagcttcacgcaaaactcattcggatatgacagcggtagaagggctactgtctatggctgtattaaaagacaaatgcctgccacagaccactcaccaacgaatagagcacatacatgaaagcctgctattttatgatgaacacacgttcggagcatccgaaagcgtcagtgatccgttgtgcgaaaacagtcaggtgcaatggggagaaaagtcagcctatgcatgggaagcagtcaaaagaacacaaatgctgtatgaaacctccgtcggtttacttcaaggagacctccgcagaggcaagaacccgacccttacgattttcaatacgttgaactggaaacgttcggagatgctgactgtatatattgattttgaagtgatcccccgaaaccaattcttcgaaataacagactttcaaggacattcgttgaaagttcaaccgatccgttatcgcagagaagggtgctactatgcaattttcgcagaggatattccgcctatgggatacaagacgtttgaaattgtcttcaaacaaccgtctactgatacaggaactattacaataaacaatgccagtatcgaaaatcatttctacaaactacaactcaacccggacaaaggaacgatccaaagtttgtatgataaagaattgaattgtgaactggtcgatagttcgtctccatgggaactgggtgcttttatctatgagaaattaggtaatcgtgaccaattggcccaatatcgcctggatgattacaacagaacaggattgagtgagtgccggatcatcgacagttcgaatggacctatttatcaacgtatcctgttgcagggaaaatctccgggaacagacgaagcattcggggtcaatctggaaattaaattatatcatgataccaaacgaatagaactggagtacgcaatcaagcgtctgccggaaacggatccctcagggatatacgttgcttttcccttccaactgcccgaaggaaaactggcattcgacgttcagggcggaacagttatatctggcaagaatcaactggaagggacatctacagactggaatactgttcaaaactttgtatcggtacaaaataatcaggcgcaaattattataggaagcagcctcatccccctctatcaactaggagacataaatctcggtaaatttcaatatcagaaacaatacgaaaggcctcatgtctactcgtgggtgatgaataattactggaataccaacttcaaagcttcccaagaaggagagttccgttggagttaccatctgacctcttccgttgacccatctagcaaccttgctaccaagtttggctggagctcacgtattcctctatatgcccgggtaatgccgacaggaacagagaatcataaacccacagagtactcagccttccattttgagaaagacaatttcctgatgacttcatgtaccccctctaaagaagaaggttatatactactgaatattagagagatagatggaaagagaaccaacctcaggattttaaatgaagacgggcaaaccatccccttcacaatagtaaacgctattgaagagaaattggaaaatgaaacgtcagagcatatatttgaggggtaccagaataaatttataaagataaaacgtttttaatcaaaagaatcaaatgcgtagtctaccctaaaaaacggaagaatcatcaccacaaagagacgaggagatgtcaaaagtcagtagcaactctcctaatactattgacttttgcccctcatcatctgtcagaacgaccggaaagtatctgctccaaactttcatcgaccactcccgccaactgaagattggacagcaagcggtcataagaaatcctccctactccttccattttcagcagccatctccatccctttcccgatactaattccagcagttgccctaccgtccggatttcttctttatacaagacattagtcagcctcgtatcggccactttgccgacagacaattggagtaccctttcttcctgattcaaatttatattcttgcttttatccgccaaagactgaaaacgggcatctatgatatgtttccgataagtagccaacacattctttctcactttcagtcctctgagatgagaattataaatctgtaacgccctgtcataagtaattcgatgccgaccggcaactttctctattgactcccccatagagatggagtagaaaatatcacgggctccgggatgaacaatcaattgggaaagttcacgaataataatttcatatagaggtttacacgttttctgtgttcgcaatacatatagcagatcatcatatctggaaataataaagtcgcgttccagctttttctcttccacaatctttgccagataatccgcttgcaatccaagccttttgtgagcttcgagataggcagtcagactttcgtcatccaagaacagttggttgcccatccggcaactggtaatgtaaccgagattcgcccagtttcgcagagttgcttcctgaacgccatgtctttcagacatttgttttgttgtgagccaataggacataaaaaaacggaactaagttaatactcttacctagttccgtaccttttatattataaaagagtacggagctgtcacatcccgctaataggaggtagtaacggctacctgatgtatacgggcagacagcccgtaccctatgagaagtcatagaagtacaggcgtcttcccggcatacatcaaaaaaatccgttacaatttcctattagccgaggaaacgcgcaatcgcacacctttaaacggtatgctacgttccgatgacaaagttacaaatagttttcggaaaataacaaaagaggctaataaatgtttggggaaaattagaaacaaagcaatcgtcactattatataaattcaaaagactatgttgtaacaattaacattaccaatccatcattttatattatataaaagtagaacagaatctgaattatttcacaatatcattcagatcaaagtagagcaaacgtgtagcagaatccacatcttcatcattcaatgggacaaaaccgtttttcatataaaaaggcacagcagccgcatacgcatcaacagttaaaaaacggcaacctgttttattctcaataataaaataacttttaataaaattcaataggaatgagcctattgattgaccttttacagacaagtcaacacccaaacgacaaatctttgcagcaggatagctttttaaacgcttctcattcacaaaccgatgtttgcggaaacgattgaattcagttttattttcaaaatcagacaaagagatcctgtcattggcaagactgaaataagcaaccgatcgctgattaactttattctcaagtacataactgacagccagcaaagcttcccgatacaggaaagattcattcaaaataaaatcgttcaagtcggtatctccgcaatcgaacgattctattttttctgaggtatctagtttacgcatctcatacgttgtctctattaactgacgatccatatctattttttaaatattttcattgccagttcgtagtctttcaatctttttgcccgctgctcggaggtctccctgcgtttttctttcatccgctcttcaaaccgccgtgcatcttctccgaaaagtatcggagtttctttaatcggtcttgccatactcacctatctcctttcttcatttaatacgctacaaaagtaacctaataaatcgggaagtgcaagtaaccaggaatttatcttcgagacatatatgtctcaaatacactcactatatcttctctatatttctttatatcaaaaagagattgccgctatcttcataaaacacggaataaaatacgaaccgaccttcgatatatacatcgagaaatacgattggtagaagcagaattattctcacccctttgagaaaatattctcataggcatgagtattttttctcactgtggtgagaattttttctcaaggcgatgagaatagtttgagaactttattgcagttgccccgccgctttcaagtaagccacatagtttacatacaactgaaaatgggcatccactttcgtctgatacgcctgttgccacataacttgcgcttccagataatccgaaagagtttccaatcccacctcatactgtttgccgctgactttcatattctcttccgcctgttccagcgaacgttctgaaagctcgcattccagtcgggcctcatccaaattattagtggcctgcgtcaattcaagcaacatcttttcattggcattttcctgttcaagacgagtctgttccagttttaccttggcagagcgcaccttattcatacgttcgccaaaatgaaacagaggtactgaaacattcagaaagacggagaatgatccttttttcatcaaagtttcgtcattgatttccaatccatggaaatagtcataacttcccttcactcccacacgtggcagcagttcactccgattcagctttacctgctgctcggccatggcgatctgtttattcaaaataccatattcgggacgggcactgatatcggcaacctgtgtcttccactcttgctccacttccggaaattcatccgagatatcaatccccgctgtcagaggccgaccgatataatggcaaagattcatgccggcaagacggagcgcattatccgccttgcgcaatgccagctcactctcattaagtttcacttgtaccttcaacacatcattctgaggtttcatgccatgctggtgggcactcttcacattccgaaacagctcattgagcaacacatgatatttctccgctactttcttcatttctttggctttcactagttgcacataagccttgtctgtattcagaatcactccggatgcagtcagttcctcattcagatgtgccatttccttgccgagcaatgacattttataggcggcgcgaatctttccgcccatataaagcggttgttccacttgtactccgcctgtatagacggtcccgactttatagtccagattcaatccggggaaataagcgtaaccgcttgttgccaactctccagtaacgggatcgggcaggaataccggcagatttcctccccgaatgcccaagctgccgtctgccgtactatacagtccggttccgcttgctgtaaaattggggaagaagttagctttatagctgagagacagcagccgggctgcctccgtctgtttatcggcagcagccatttccttgttatattttagagccatttcacggcattgtttcaggctgagcttctcttgtgccgaaacagaaagagaagccgccattccaaacaaaacactaacagctacgagaaattcttttttcatttgtctgtctttttgatatgaaagaataatgcatacagaatcgggataaagagcaacgtgatgagcgtgccaaacagcaatcctcccatgatagaagctgccaacgaaccgaacatagcatcgggcaacagcggaatcattccaagaatagtggtcagcgaagccatcatcaccggacggagacgactctgggagctatcgatcaacgcagtgaccggttctactccctggctgatctgcaacgtaatttcatccatcagcacaattccgttctttataatcataccgatcaatcccaatgtgccgacaatcgccacaaaattgaatgtcttcccggtcagcaacatcacggcgactacaccgacaaaaaccaacggtatgcagcagaaaatgataatcggcttacgatagtctttaaacagcataatcagtatcgagatcatcagaataatggcaaacgggaagttcttgaacaaatactgcatagatttcgtactggcattcctttcaccctgccattgcagtttataaccgtcgggcaatgggatctgctctatctgtgcggcaatggactggcgtgccttctctgtttctattcccggaacaggcgaacactgtacacgctggctacgctgcccgttatagcgggggacgacgggatcttcccactgtacatcgatccgcttgctgatctgtttcaacggagtagttcccatcaaggtttctaccagttcgtctttcgaaagcgttcccgttttcagtttcatcatcatctcctgcgtcaacaagccattcaaagaaggaagagaagaaaatatttgtgtgttatccaaatcctcaatcggtcttccctgttcgtcaaggcagcgcagatagatattgtcccgatggattccttcgtggaaagaaccgatgggaatgccactggtggccgaaagcaacgagaggcttacatcattacggctcagtccgatagcgcgggcagtcggctggtcatattcaatggtcagcacgggaatctgcggctcccagtccgtagttatcagatatacatccggacagctttccataatgctgcgggcactgtctgccaattgatgcaaaacaaccgggtccggccccgtaaactgtgcctcgatcggatatttcttgaacatcaggttatagcggttcagtttcacgtaggcatcggggtaacgagacgaaagatattgctgaatctcgggcatattatccaccaatgcatcgggagaagtaaagtctataatcaattcaccgtatgccaaagaaggattggctatgttacgcaccaaattataacgaccgggggtaccaccgacggaagctgtgacatgggtcacttccggacgagttttcagataggcttcaatctcttccaagtcacgtgtgacacgggtataatttgttccttccggcaatttatattccatataaagctgatcgtacaccatatccggaaagaaaccctgtttcatgaaccgatagctgaaagctgaaagagcaaccaacgctaccatcgcaaagacaaaactccagcgatgagccagactaaaccgcagcaaggaacgtaggacggcataaatctttccttcatacacccgttttccggtagttgacgcttctttcgaaacttcgggatgcaaaattcggttggccatcaacggtacgtgcaccagagccagtacccagctaagcagtaacgaaaccgccagcacgataaataagtcgcgcgtatacacccctgcagtatcgggagacatgaagataggcaggaaagcaatgatagcaatcaaagtggctccgagcaaaggcatcgcagtctgccgcccgatagcggtcattgcctccatacggctcttgccggctttcagatcgaccagtataccgtcaataataacaatcgcattatcaaccagcatccccatagcaagcacaaatgacgccagcgaaacccgttgcatcgtgccatccacaaaatacaggaacagaaaggagccgaacaccgttaccaccagactgattccgataataactccactcttgaatcccatcgttatcatcagaatgacaactacgataatgaccgattcgatcagattaagaatgaatgttcccaacgaaccggatacacgttccggctggtagaatactttatgacactccactcctgtcggaagccgctccgctttcaattcgtccagtttctgttctacccgtttgccaatcttgatgatatccgaaccggaagaagccgcaatcagtattcccatggcacgctgccggtcataaaagagttcattgcgggtaggattctcataatctttctcaattcgggcgatgtcactcaaacgtaactggtcatcatcgtgcccctgaatcagcatacgtccgatatcttctaccgtcttgaacttgtcactcaccgttacccgaatacgattatcgccattatcgtagtatccggtataagtggttttattctgtccgttcaaggtagcgagaacttcggcaggtttcacgcccagattcgccatccggtcctgcagtaaagagatgttgatgcattcctcacgctttccatacaagtcaacccgttccactccgtccagttcgctgacttcccgctttatcagttcggcataatcagacagttccctgtcctgcaatccgtctcctgtcagcgcataaaacataccgtacacatttccgaaatcatctttcacaaggggagtagcagcgccttcgggaagttccgcctgtgcattcgctaccttacgccgcaacaaatcccagcattgttccacatctgcctccttgacggtcgttttcagttccacctgaatcagggagagatcattgtaagaataactttctacattatctatattccccattgtacggatattcttttcaagtacatccgtcacttccagttccacctgatgtgcggacgctccgggataggtagtcactaccatggcgactttcaccgttacttccgggtcttccaacttactcatttcatagctggaataagctcctccgactatcagcaccgcaatcaagaagtaaattaacttcttattttcaaatgcccatttacttatatcgatcatagcaatcctcccacattggttttagaagctggcaaaaggggttctacctgctccccgtctttcacatgatgtactcccgaagcaacaatcaagtcaccgggcttcaagccctccgcagtcaccaggcacctgcctctgcccagcagacgggtgactgtcacatcacaacgacggatggtccggctggaagcatcataaaggaaaacactcgccatccccttatcacgaagaaccgcacccgtaggaacggacagatgacgcacttccccttcggtacattctatagtgaccattgtattcattccgggggaaggaagcgcctgcgcttcacctttcttcaactgcaaacgcatcgtatacagttgattggcattcgctttaggggtgacatttatcagatcgagcgcatactcctgaccaggataaatgtcgaacgtacaagtgtaaccggtgaactgttggcgacggatatattctactgccggaagattaatttccacctccggtgtcccctcgctgataatggagacaacgggcataccggccgcaatagtctcatgggaatcaaaaagacgtttctgtacatatccgctgaaaggagcatacaaacgggtatattccagctgatctttcgcatgattgtacttggcggttatctgtttcaacccgtacatcgctttatcattggcgtcgggagtcgttacattctccttataaagtgccatcacacgctccgcctccgccttcacactttgatactccgcttccgcagcatccagctgaatctgataatcagcagggtccagttcggcaagcagctgtcctttgcgcacatacgttccgtcgttgacgtacatacgcaatatagttccgcttacacggaatgataaacttatatcctgcgccgccttcacccgtccgggaaattgcaaagccgtctgtccaccggcagaaagtacagtatcaatcttcactgtaggtttgctatctgtaatctgtgtacgttggctgcaagacgccaacaaaacgactaaaattcctgttaataaaaagttgaatcgtttcatattttcatttgttatttagttcatgcaaaagtatcccaagcagataaaagtaaaaaggttgatttaagctataaattgtccaatttgcagttttttcaacttaaaatcctcaaatactttgctatttgtatttatttatacgtttctttgcaacagaaaccaccccaaaagaaaagaggaaatggaacaacagataccttttagttatgttataatatctccggagaatgctacggaaaaagaaggctgtatgatatctactatagacaagtgtggtttctttttttgccagaaaggagaagtggaagttgccctgaatgacaagtcgtatttaataagtaaaggaagtgtctgcatttatatgacaggcagtctcttgcgcatccagcgtatcagcaaggatataaaagggattatgctggaggtggatttgaattatattattccgatcgttaataagatagtcaattcagaaaacctgctctatctacgggaaaatccctgtttctcaattacagaatatcaatacaactatctggaacaattaatcaaagccctacaacagcgaatggatataaaagcacatgacatcccgctgcaaagacagcacctgatatccgagctcatcaaatcatgggggcaaaccttatgctatgaattgctgaacgtttattttaccaaccagcctctcaaacctttatcgcaagacaaaaaggataaaatctttcagaacttcgtcattaccctcttccgctattatcagcaggaacgggacgttaccttctatgccagtaaacagtacctttcttcccggtacttttctgctgtcattaaagaaaaatccggtagtaccgccctgcaatggattgtacaaatggtaattaccgaagccaaacaactgctcgaaaactccgatctcaccatcaaggaaattgcaacaaagctgaatttcccgactcagtctttcttcggtaagtatttcaagcaatacgtaggtgtctctccgaaagagtatcggaataaacagatcaggcagttgcctttctgaactgacggaactgccaccaaagcatccctcctgcaatcagactggctatcaaatcagagataggcatactgatccacacgccgagctgcccgtaaaaccggggaagaatcaacaggcaaggaatcagtacaagcacctgacgggaaatagagagaaagatagccttgctcgccataccgatactctggaagaagttggaagtcaccatctgaaaaccgacaatcgggaaaaacatcacaacaatccgtaagccctttgccgagatattcaccaattcttcgtgcgtcgtaaagatagaaacagccagttgcggaataaacattcccatcagaaaaccgatggttgtaacaatggtcgcggcataaatcgttattttcagcacttgcgtcacgcgcggatactgtttggcgccgaagttatagccggcaatgggctgcattccctgattcaaacccatcacaatcataacgaagaggaataccagacggttgacaatgccgaaagctccgatagccagatcccctccgtgctgtttcagccccttattaataaggatgacgataaagcaggcggcaagattcatcagaaagggagccataccaatggccagagaatcaaaaacaatcttctttttcagtcggaaaatgcctttatgaaaatgcaggagttcgtccttattactaaacagcttgaactgccagagaagtgcgatgacctgtgcggtaatcgtagcgatagccgcaccctgtattccccagccaaagccgtaaataaaaataggatcgagtatcgtattaatgaccacggtagcaatcgtagcatacatcgccttctgtggatgccctgcggaacgaagtaccgcattcaggcccaggtaaagatgggtgatgacatttccccagaggataaccaccatatagtcgcgggcatagccgacagtcgcctcacttcccccgaagaagtaaagaatcggatcgaggaagatcagggtaagaaccgtaaaagccagtccgatgataatatttaataccagcacattgccaagtacccgttgtgccgtatcataatctttctgtcccagcttcaccgataccagtgtagccgctcccacacctaccagcgaaccgaaagccgctgcaaggttcatcagcggaaacgtaagtgccagccccgaaatagccattgcccccaccccgtgaccgatgaaaatactatctaccatattataaagagaagatgccgtcatggcgataattgccggaatggcgtactgcattaaaagcttcccgatcttttccgtacccagcgcagtgggtgtcttttgtcctgtcatacctattgttttgagggcgcaaagatacaaaaaagagacggattacaggatatatgagaaaagtttcgtatttttgcctccaaaattgagttaatacataacgaaatgaatatattagaactaagtgaacaggaaattattcggcgcaatagtctgaatgagcttcgtgcaatgggtatcgatccgtaccccgctgcagagtatgtaaccaatgctttctctactgatataaaagcagaattcaaagatgaagacgaaccgcgtcaagtttctgtagcgggccgtattatgagccgccgcgtgatgggcaaggcttcgttcatcgaactgcaggactctaaaggtcgtatacaggtatacatcacacgtgatgacatctgtccgggagaagacaaggaattgtacaactctgtattcaaacgcctgctcgacttaggtgacttcgtaggtatcgaaggtttcgtgttccgtacacaaatgggcgaaatcagtatccatgccaagaaactgaccgtacttgccaagtctatcaaaccgctgcctatcgtaaaatataaagacggcgtagcttacgactcttttgaagatcccgaactccgttatcgccaacgttatgtggacctggtagtaaacgaaggcatcaaagagacattcgaaaagcgtgccaccgtagtgagaacactgcgcaacgccctcgacgaagccggatatacggaagtagaaacaccgatcctgcaatccatcgcaggcggagcaagcgcacgtccgttcatcactcaccacaactcactggatatagacctctacctgcgcatcgcaacggaactttatctgaaacgactcatcgtaggtggttttgaaggtgtatacgaaataggaaagaacttccgtaacgagggaatggacagaacccacaaccccgaattcacttgtatggaactttatgtacagtacaaggattacaactggatgatgagcttcaccgaaaagttgctggaacgcatctgtatcgccgtaaacggaagcaccgaaaccgttgtagacggaaagacaatcagctttaaagctccttaccgccgtctgcctatcctcgacgccatcaaagaaaagacaggatatgacctcaacggcaagagcgaagaagaaatccgtcagatctgcaaagaactgaagatggaagaaatcgacgacaccatgggcaaaggcaaactgattgatgaaatcttcggtgaattctgtgaaggcagctacatccagccgactttcatcaccgattatccggtggaaatgtcgcctctgacaaagatgcaccgttccaaacctggactgaccgaacgtttcgaactgatggtaaacggcaaggaactggccaatgcctactcggaattgaacgatccgctggatcaggaagaacgcttcaaagaacagatgcgtcttgccgacaagggtgacgacgaagcaatgattatcgaccaggatttcctgcgtgctttgcaatatggcatgcctcctacatccggcatcggtatcggtatcgaccgtctggtgatgctgatgacaggacagaccaccattcaggaagtactgttcttcccgcaaatgcgtccggagaaagtaatcaagaaagaccctgccgccaaatacatggaactgggtattgcagaagactgggtgccggtcatccagaaagccggctacaacacagtagctgatatgcaggatgttaatccgcaaaagttgcaccaggacatctgcggaatcaataagaaatacaaattagaactgaccaatccaagcgtgaacgacgtgaccgagtggataaataaacttaaataagttgagagttgagagttgagaattgaaagttgttacttgaacaacctttttaatgaccaactctcaactttcaactttcaactttcaactaaatatgaaactacccggtaagatagcgataatgggcggaggaagttgggctacagccatcgcaaagatgtgtctggctcaggaagactctattaattggtacatgcgacgagatgaccgcatcgctgattttaagagacttggacataatcccgcctatctgacaggggtgaaattcgacacgaagcgtatcactttcagttctaacatcaacgatgtcgtgaaggaatcggatacactgattttcgtcaccccctctccttatctgaaagctcatctgaaaaagctgaaaacaaagattaaggataagtttattatcactgctatcaaaggaatcgtacccgatgacaacgtgattgtatcggaatatttcacaaaagaatatggcgtaccacccgaaaacatcgcagtactggcaggtccctgccacgcagaagaagtagcgctggaacgcctctcttatctgaccatcgcctgcccggacaaggacaaagcgcgcatcttcgcccgccgtttgggaagcagcttcatcaagacttccgtcagcgacgacgtagccggcatcgaatacagttcggtgcttaaaaatgtatacgccattgccgccggcatctgcagcggactgaaatacggcgataacttccaggcagtactgatatccaatgcgattcaggaaatgaaccgcttcctgaatacagtacatcccctgaacagaaatgtagatgattctgtttatttaggagacttattggtgacaggatactccaacttcagccgtaaccgcacgttcggttcgatgataggcaagggatattccgttaaaagtgcgcagattgaaatggaaatgatcgcggaaggatactacggcacgaagtgcatcaaagagatcaacaagcatcaccacgtcaacatgccgatactggatgccgtatacaatatcttgtatgaacgcatctcacccatgatagagatcaaattgctgactgattcttttagatgagaaaaataggtaataagtaataagtattaggtattaaccgtagccacctaagctttacgtctcatgcataatacttattacttaatacctattacctattacatattacttaaaattgatagatatgattagcttgaacattgaaaaaacatttggattcatctccaaagaaaaggtttctgcttatgaagccgaggtaaaagctgcacaggaaatgctggaaaaaggaacaggagaaggtaacgacttcctgggatggttacatctgccttcgtccatcagcaaagagcatctggctgacctgaacgctactgcaaaagtattaagagacaactgcgaagtagtgatcgtagcaggtatcggtggcagctatctgggcgcacgtgccgtaatcgaagcgctgtctaacagtttcacatggttgcaggacaagaaaactgctcctgtcatgatctatgctggacataacatcagcgaagactatctgtatgaactgaccgaatatctgaaagacaagaaattcggcgttatcaatatctccaaatcgggaacgactaccgaaaccgctcttgctttccgtctgctgaaaaagcaatgtgaagaccaacgcggcaaagaaaccgccaagaaagtcatcgttgccgtgacagacgccaagaaaggtgctgcacgtgtgactgccgacaaagaaggatacaagacatttatcattccggacaacgtaggcggacgtttctctgtgctcactccggttggtttgctgccgatcgcagttgccggattcgacatcgacaaactggttgccggtgctgccgatatggaaaaggcatgcggttctgacgttccgtttgcagaaaaccctgcggctatctacgctgctacccgcaacgaactgtacagacaaggcaagaagattgaaatccttgtcaacttctgcccgaaactgcactacgtaagtgaatggtggaaacagctttacggagaatccgaaggtaaagacaacaagggtattttccccgcatctgttgacttttctaccgacctgcactctatgggacaatggattcaggaaggcgaacgctcgatcttcgaaactgtgatctcactggataaagtagaccataaactggaagttcctttcgatgaagctaatctggacggcctgaacttccttgccggcaaacgggtggacgaagtgaacaaaatggccgaactgggaactcagctggctcacgtagacggcggtgtacccaacatgcgcatcgttcttccggaactgagcgaatacaacatcggcggtctgctgtacttcttcgaaaaagcttgcggcatcagcggctatctgttgggcgtgaatcctttcaaccaaccgggcgtggaagcatacaagaaaaatatgtttgctttgctgaacaaaccgggatacgaagaagaatcaaaggctattcaggctaaactgtaatatccaataactgacaataaaaagaagcggcctctccggagaccgcttctttttattatatttccttcgttacgttaaagtgactcactccctttcaggattcattcattctcaacgacttctgttttcaagtcaatcacttcctgcgctccttcacactccgcttttgaagagagataaaaagataattgtacatcaccatttttatctacatgctcaatagtggcatgaaccagcaccttagtctttgtcacgccatctttgaagcgcaactgccctttttcttcgtctgtcagatttccttcggtagtgacttctgtcttttcataacggagctcagtcttcatctcttccccattctgaagctggaaagatttcagttcggctccattgccgtccaagatcaaaaacgcatccaccttatctcccactttcaaagcaggcatttcactcatccggtttgcatagtcttcgcggatggtttctccatcgccttgatctactttcacatatagcttttctatcgtgataacagggctttctccgctatccgaacaagcacccagaaacaatggcagcagaaacaatactttctttttcatgctattgactagttttatcatgctacaaaaatacatattatcttctaaacgacaaattatcatacgatttatcatccaaaacacaaccagcaactatctcctccattctgttatatctctcattttttatgactatctttgcttcgtatatctctttttatcccaagaataaatgaattctaaataaaagaacaatggaaaaattagtaagaagaccgaatgcagtgatattgtttatcagcttgtcactactgatgatgttaaccaccggttgtcaggaaatcaaactcaaagcaggcattgaggctgccaacaaacaatgtccgatagacatgggagagaccggaaaaatcaccagcatcgtctatgatggagagaacgtagtgtataccttttatctgaacgaagaggctgccaacatcaagactctgcagaaaaatccggaaagcatgaagacttccctgaaaatcatgttccagaatccgaataaagaagtaaagtcattgctggaccttgttgtaaaatgtaaagcgggcctgcaaatgatatatataggtaaagattcaggagagcaggtagtctgcgaactgacaacagatgaaattaaggaaattctcaataaggatgtcgacaccaccgaaagcgacctggctaaactggaaacgcaggtacagatggcaaacttacagttcccgatacaggcaagtgaggacgttctgatcgagaaaatcgaactcagcgatgaagcagtgatttatatctgtcgtgttgacgaagatctgtgtgatatgaaccagattaaagcaaatgccgcagaggtgaaacaaggtattatcgaaacattaggcaatcagaccgatcttgctacccaactgtttatcaaaagttgtgtgaattgtgacagaaatatagtctacagatatatcggcaaacaatcggaagctcagcatgatgtagtgatcaccgtgcctgaactgaaagatatgctgaaaaaagaataaatatcaaacagattccatctaacctaattatgagaaagaaactgaaagccgtcctgttcgatatggacggcgtgctctttaactccatgccctatcactccgaagcatggcatcaagtcatgaaaactcacggccttgatctgagccgggaagaagcatatatgcacgaaggacgcacgggggcatcgactatcaatatcgtatttcaacgtgaattaggaaaagaggccacacaagaggaaatagaaagtatatatcacgaaaaaagtatcctgttcaattcttatccggaagcagaacgtatgcccggcgcatgggaacttttgcagaaagtaaagagtgaagggctgactcctatggtagtcactggttcgggacagctttctttgttggaacgtctggaacacaattttccgggaatgtttcataaagagctaatggtgaccgcttttgacgtgaaatatggcaaacctaatccagaaccttatctgatggctcttaagaaaggaggcttgaaagcggatgaagctgttgtgattgaaaacgcacctttgggcgtggaagcaggacataaagccggaattttcacaatcgcggtcaatactggtccgttggacggacaggtgttgctggatgccggagccgatctgctgtttccttctatgcagacactctgcgatagctgggatacaatcatgttataaacctataaataccgattctactatgcaaaagttattatccttacctcccaacttaattgacagttttcatcaactggaagaagtgaatcatactgactggttttgtacatcagaccctgtaggcagcaagttaggctccggaggaggaacgacctggctgttgcaggcctgccatcaggcttttgcaccggaagagactttcagcaaatggattggaaacgaaaaaaagattttgctgcatgcgggaggacaaagccgccgcttgcccggctatgctccttcgggcaaaatactgactcccataccggttttcagttgggagagaggacaaaagctgggacagaatctgctgtcgctgcaacttccgctatacgaaagaatcatgaagcaggctccgaaaggcttgaacacgctgatagccagcggagacgtatatatccgttcggaaaaaccgctgcaagacatcccggaagtagatgtcgtatgttatggtttatgggtgaatccttcattggctactcaccacggagtattcgtatcggaccgcaagaagccggaagtgctcgacttcatgttgcagaaaccttctttagaggaattggaaggattatcaaagacccatcttttcctgatggatatcggtatatggatattaagtgaccgtgccgttgaggtattgatgaaacggtcattgaaagaaggcacgaatgatatcagctactacgatttatattcggattatggcctggcactgggagagcatccccaaacgacagacgatgaagtaaacaaactttcggtagcaatcctgcctttacccggcggagagttttatcatttcggaacgagtcgggaactgatttcttccacactcgccatacaggataaagtgcgtgaccaaaggcgtatcatgcaccggaaagtaaaaccgaatcctgccatctttatacaaaactcgtttacccaagtgaagttatctgcagagaacgccaatttatggattgagaacagccacgtaggagaaggatggaaattaggttcacgacagattattacaggagttcccgaaaaccattggaatataaacctgccgaacggagtctgcatcgacatcgttcctatgggagacgcagcctttgtcgcacggccttatgggctggatgatgttttcaaaggtgatttaagaaatgactcgaccacctacttggggaactctttcacacagtggatgaaggaaagagagattgggctggaagacataaaaggacgtacagatgatctgcaagctgctcctgttttccccgtaacgacttccatcgaagaactgggtattttaatacgctggatgacagctgagccacaactaaaacaaggaaaagagttatggctgagagctgaaaaactatccgctgacgagatatcggcacaagcgaacctggaacgtctttacgcacagcgcagcgctttccgcagggataactggaaaggattgtccgccaattatgagaagagtgtattctatcagcttgacttgcaagacgcagccaatgaatttgtccggctcaatctggatgttcccgctgtcttgaaagaggatgccgcacccatggtgcgtatacataaccgtatgcttcgggcacgtatcctgaagctgcaaggcaatgaaggctgcaaaggagaagaacaagctgcgttccagctactccgtgacggattactggaagccgttgccggaaaaaagaactatccgaagctcaatgtttattcggatcagatcgtatggggacgtagtccggtgcgcattgacgttgcaggaggatggacagatacacctccttactctctctattcgggaggaagtgtagtcaatctggcgattgagttgaatgggcagccgccgttacaagtatacgtcaaaccatgtcacgagttccatatcgtacttcgttccattgatatgggagctgtggaggttatccgaagttatgaggaattgcaggattacaagaaagtcggttcgcctttctccataccgaaggcagcacttaccttggcaggatttgccccattatttgcggcggaatctcatgcgtcattggaagaacatctaaaagcgttcggttcaggactggaaatcactttactggctgccattccggcaggttcgggactaggtaccagttctatccttgcatctaccgtactcggagctatcaatgatttttgcggactggcatgggataggaacgacatctgcaattatacactggtattggaacaattacttaccaccggcggcggatggcaggatcaatacggcggcgtattccccggcgtaaaactgttgcaatccgaatccggcttcgaacaacatccattagtacggtggttacccgaccagctctttgtgcagccggaatatcgggattgccatctgctttattataccggaatcacccgtacagccaaaggcatcttagctgaaattgtcagttccatgttccttaactccggaaagcatcttagtttattagcagagatgaaagcccatgcgatggatatgagcgaagctatcctgcgaggtaatttcgaaactttcggcaatcttgtcggcaaaagctggatacaaaaccaagcattggacagtggcacgaatccaccggcagtagcagctattatcgaacagattaaagattatacgctaggatataaattgcccggtgcaggaggtggcggttacttatatatggtggctaaagatccgcaagcggccggatgcatccgtcggatattgaccgaacaggctcctaatccgcgtgcacgctttgttgaaatgacgctttccgataaaggattacaggtatcgagaagctaagaaaaaagttatataagaacaaaaatcccttgataaccactgattatcaagggatttttatgtgaccccggtgcgattcaaacgcacgaccttcagaaccggaatctgacgctctattcactaagctacggggccatttcctaaatgcgatgacaaaagtataaaaaatcttctcatcttcctaatgattcatctttttttatagttcttaagtcagtatcgccccttaacattctgttattttgaaatgctttagagcatatactttatcaatttgacaatcttttagagattatccaatacagatatcaatattattcctatctttgccgacaattaacaatcaacaatcctatgagttacttgataaaaccaaagaactataaaccgttactcgacttaaaacaaacagagttgggaatcaaacaaataaaagagttcttccagttaaacttgtcatccgaattacgcctcagacgcgtgacagcccctcttttcgtactgaaaggaatgggtatcaatgacgacttgaatggtatagaacgtcctgtttcattccctatcaaggatttaggtgacgcacaagcagaagtcgttcattcattagccaaatggaaaagattaactctcgccgattacaatatcgaaccgggatacggtatctataccgacatgaacgccatccgttctgatgaagaactcggaaacctccattcgctctatgtagaccaatgggactgggaacgtgtcatcaccaacgaggacagaaacgtagatttcctgaaagagatcgtaaatcgtatctacgctgccatgatccgtacagaatacatggtatatgaaatgtatccgcagatcaaaccttgtctgccccagaaattacattttatccattcggaagaactacgccaactctatccgaacctggaacccaaatgccgcgagcatgccatctgccaaaaatacggtgccgtatttatcatcggtatcggttgcaagctaagcgacggcaaaaaacatgacggacgtgcaccggattatgatgactacacatccaccggcctgaacaacctgccgggactgaacggtgaccttttactttgggatgatgtactgcaacgctccatcgaactgtcctctatgggtgttcgtgtagacagagaagcgctacaacgccagctcaaagaagaaaacgaagaagagagactgaaactttatttccacaaacgattaatggacgacacacttccactatctatcggtggcggtatcggtcaatcccgtttgtgtatgttttaccttcgcaaagctcatatcggagaaatacaagccagtatctggcccgaagatatgcgtaaagaatgtgaagaacttgatatacaccttatataatagctatgaacgtacaaatagaagaaagctggaaaacacacttacagcctgaatttgaaaaagattactttcgcacactgacagaattcgtaaaaagtgaatatagccagtatcagattttccctccgggaaaacttattttcaacgccttcaacctctgtcctttcgacaaagtgaaggtagtaatcatcggacaagacccgtaccacggaccggggcaggcacacgggctctgtttctctgtaaacgacggagtacccttccctccttctttggtcaacatctttaaagagataaaggcagacataggtacagacgctcctactaccggaaacttgactcgctgggctgagcaaggagtattattgctcaacgctactctgactgtacgcgctcatcaggcaggctctcatcagaatcgtggatgggaagcttttacagatgccgctatccgcgcattagcagaagaacgggaacatcttgtatttatcctgtggggagcttatgctcaacgaaaaggagctttcatcgaccgcaacaagcatctggtacttagctctgctcatccctctcccctttctgcctacaatggtttcttcggaaacaaacacttcagccgtgcaaacgattatctgaaagcaaacggagaaacggaaataatatggtaataccaaatccgatagaccggattgagacataaagaaaaacggctgcatcatcacaaaagatcatgcagccgcttttttatatcttatccttccggacttattctctattctttatttccttcattaataccactgaatattactttgcgtctgacttctctgctcatacttcaagtcctgaaggatacttgcattggcacgaatggtaacattgtagtatttccagcgtccgaatggtgaaaggctggcagaaaggttaaagcagtgcaggtcacgtgagatcgtacaggaagtctgcgtaatctcttttgcctgaaagtcataacccgaattgaatgaaagcgaccagttattggaaatcttcacattaccattcatattaatattgtgggtataagtaaacggataacgcattgaataacggttgataggcttagtcctgtcctcacgaatattgaatgaataactgaaacttaaagaccaaggcatcttgaatacctgataaccgtccgggtcggcttgcgccttctctaccttcttggtcgtagttccatcttccgttccttcagaatcttctccgtctccatcttcagaatccttcttattcttatcctgttcagcgtcttccttcggaccgaaccactttttccaggtatcgttattaaaggtatagttaaaagaagaaccatacccctgaaaacgtccgaaacgtccatacgaccattcagttcgattaccttcgaccacattaccacttttatcaaacgtataagcgtaagtagcaaatgatgcattcatattgaaagtataattctttgtcagtttcagtcgaagattcatactcaaggggctccatggcttttcctttgcagccatattatatgacatattcacactcaaatcatcaatcaagctgactttctttaatgtatccttcttagcatcataatatttcatctccagattattagcaatcgagaaactaaccgttcccgaaccctcacgtgaagggactccaaaaggctgtcccgtatagggtgaataatactgagtatttccgttattatccgtatactcttcccagtatttactaaatgcaggagcaccactgataccaacctgcggagtgacaacgtggcgaatctgtatctctttcttcttcatgaaaagaggtttgtacataccatacagtttagtacttaaagacaaactggctgaatagttggaaacacgataaaagccattaatagtatcattcagattctgttccaaacgccctgtttcctcattatacgtctgatttatcttgcgggtgtaccaacgctccgtataattcaccgaaggattgacctgcaaatacttgaacagtgtaaaagtagcactgacaggaatattatggttcatcgcattttcccatccgctgatgccggtcttgaacagacggtcgtctttagtacggatactgttcgtcagacgtcctgtatagctgacagaaatcttctcataccaacgctcggctccggcagccttcttccgcttgaagggaaacagacggctcaatgtaatattaaggtcaggaagcgttactgcaatggatgagtcacgcatggtctgcgcaatattggtcgttccagacaaggtcagaccgatatcggggaaactacgggagtaactgatacttgatgtctttgtattctgagtcaacaactgggagttataaaggttgttgatgttagatcgttcgtaactactggtagagaagttcacactggcggagaaagtactgttcggacttgccttggcatcctgacggtggttccacactaccttgaagtctttggcaaccgtataatccggcattcctttgtctccggtcttggtcacctgataatccgcctgcaatgtaccggagtatttgtacctcttattataattggtcaatccggaaagccgccatgaacctttcgtgaatatatctcctgtcagcttcaagtccatgatgtcgctcatagcgaagtaatatccgccttccgccagaccaaagccacggcttgaatcatccatatacgtcggcattataaaacccgaagaatagctgctggagaaagggaagaagaaaaacggcacagccaacggcaggggaacatcttccaccacaagataggcaggtcctgtcactacattcttcttggggcgcactttggctcttgtcagctgcatgtagaagtgaggatggtcatgatgatcacaagtcgtgtagcgaccgtgctccataaagatttcatcatttgctcccttcttggctctgctaccggtcacataaccttcaccctgctgagtgataatatcggtgattcccgcttttttgctcttgaagttatagctgattgtttctgtatcgtatgcagtttcaccttctttaaagacaggtttacctttgatcgttcccgttgtgtctttaataccataggcgtgtactgtactactgtccagattcatggaaatcacttccgctgccagctcaatgttctgatagttgactttgccgctaccataaagcgtagcggcacctcccaatgtaaaagtggtggagtcgttagattcataaataaccggtgcatcgagcggttgtttctttgtcggtgctacagagtcgacgcgtaccacaactgtatccgcccctaacgaatctttcctgttaagggaatccgtttgtgcagtgttggaggcaatcatccctcttcttcgacgctgagacgtagcctcatcaggaagcatcagcaagacaatcagcaatatgaatgatataattatttttgctctcaatggcgccattaactaatagttttacgcttgaagtggcaaaagtacacaatcttcatcaataatgcgtgagaatctccgttatttaattattttttagtgctataaaaacaaagagcaccacccatcaaagcggtttagaccttcttcaccatattttgcaatgcttttccgggctttttctactgtcttttcttcgtcaagatgagttttagaaaagaatttatcggcaaaacagattatttgctcttccagagtgacgggcaccatctcacgatgaggaacaggaagctggcgttctatgatttcttccagtgtcagtccggctccggtgtgacgttcgcaaaccagtgcatggcgttcaaaaccttcttttcgcaaaaggtctgcacccagataaccgtgtgcgatgtagggatgctctccgaaacattggatggtgggagcatcggtcataaagattcctatatcgtgcagaagcgcggcttctctgacaaagctgcggttgataggtaagttaggatgtgcatctacaatcttcaaagctttttgggctacagaaaggctatgtattagtagaatgtgtcgttgttccgtatcctgcggataaaatttgtcgatgatttctattggattcatactttttcactagttattacttgttcccttactgataaatgatatttttgtgcaatattacaaaaatttactgatatgcaagccagaagttccctcattcttttctctctgttcataatactgtgttctacatacgccagtggaaaagtaattacgggtgccgagcgtatggatcaatacctgccgttaatcaaaggaaagcgggtaggaatggtggtaaaccacacttccatcgtcggcacagagccaattcatctgctggatactttattaaaacaaaaaatcgatatagtgaaagtctttgcaccggaacacggtttccgcggcaacgcggatgccggtgaaacagtaaaagacggaaaagacagccgtacgggagtaaccatcgtctcgctctacggagataataaaaagccgactgccgcccaactgaaagatatcgatgtaatcttgttcgacatccaggatgtgggcgcacgtttctatacatatatcagtacgatgtattatgtaatggaagcttgtgcggaaaacaaaaaagagatgattatactggaccgccccaatccatgcgattacgtagagggacctgtattaaaagccggatataaaagttttgtcggaatgctgcctttgccggttcttcacggttgtactatcggagagctggcgcagatgatcaatggagaaggatggatgactacccaggcaaagacttgtccgctgactgtgattcccgtaaaagggtggaaacacggacagccctatgtacttcccgtgaaaccgtctcccaacttgcccaatgcacaatccatccgcctttatgcctcactttgcccttttgaagcaacacgtgtcagtgtgggacgcggaacgacctttccttttcaggtgttaggcacacctaacaaaaagtatggcgattttgccttcactccgcgctccctgccgggattcgacaaaaatccgatgcacaaaggagtcacttgttatggcgaagatttacggaacgtaacagacgtaaacggtttcacgctccgttactttctgcgtttctaccgtttatccggcgaaggcgcagcattcttctcccgtccccgatggtttgacttactgatgggaacggattcggtacgcaaagcgatccttaaaggagaatcggaagaggaaatccgtgacagctggcaaaaggagttgcagacctaccgtgatatgagacagaagtatttactttactaaggaacggttcctccacttctcagcattccgttcgaactcttcggctttctttccactcaaccttgcaggcatttcaagtatctccggaatgtcttttgcattgtcaatgatttgagtgccggaagcgttcttcacaatacggacatcatcgtacagtgagtcattctccagataagcttgcatccggagcgtgtctcccgtcacgtcgatatgctggtagaaacggcggtccgtcccgaaacgatcatacttatcattgaaagatagacggtaactcttcggggaagcgtggcttaccagatacaacggggtggtcatttcgccctcatcgttcttattagtcatacgggcatagttatgctcatgtccctgaagcaccaagtctactccatattcacggaacagtccgtcgaacatccagcgtacggcaaggttgttcgttttaccttttatagaatatacaggatgatggagcatgacgatcttccatttctttttcgaagccttcagcgttttctccagccattcccgttgagagaagaggaaccaaggatcacggttactatccagcgtgatgatagtggcatcgttgtaatcaatagaatatacattattattcttatacctcgattcgagcagataagaaaagacataagcaaatcgtttctccaaaacacgtaccagtccttttacatattcatgatttcccggagaaaccaatatcggtttggtgggagctatggaatccacgctctgataggcttcatcccagtaacagttcatcggacgctctgcaaagtcaccggcaaacatatagaagtccgcctgcggatagcgatggcgcacattttccataaagccacgtgtctttccacgcaaagtatcctgcacgtcacctataaatacaaaggagaaatgatcagtcgaatcgggttgcatcgtgaacgaataccaatcggatgagcgatcgtcattccatacccgataagagtaggaatcgccataagagagttctttaaattttgcccagttggcataaccgaacccgcccagtgtacggagaaatttggaagagccgtcaacgagaagagtatctccggaaccgatctttgtatattccagctttgcctgcttggaaacgcctccgcacacccagctcacattacgggacagttcgccgtcatttccgaatgtcagaaatacccgttgcgggtcttccgtcagcacatagcgtatttcagggatattgtggaaccagactttccagcgtatcttacaaatgacaccaccggcaatcaatatcaggagaacgatgccccaagctattttcttcttcgtaatcttcatttttccgattttaaaaactggtagcaaagataaatatagtgtcccataaatcggaaattatgtccttttttaacctttaacaaattcacctctacatgagaatttaaatatctaaaattgctgtcatctgtcaccaaaagctaaataacacactgattataagctaataaagaggtgacagcagggcgtgacagcattgtgacagcacattttgttgtcacaatgccgtcacgctttgctgtcatatcctgctactatcatatattgctccttggaatgataaatcaaagaatagcttagtctagttggtttccatgcgatgaaactatagttccaaagcattgaaaccaatagtttcaagccgcagaaactatagttccaagctgaagaaaccaaagtttcaagcagaggaaactccagtttcaagacgatgaaactaaagtttcatcaagcaaaaaacaatttctacaataggaaactatcagcagtaaggtagcttcagtctcttgtttttctcttcttccacaattgccagctattaataatattttgccacatattaacacatcaccatacaaatctgattatcagcaaataaatccacctattactaatagcaggtaacaaaaaaacgaagaaaatcgcttagtggtgggcttcgtgtacaaaggcaacaaagggaaattacctgccaaaaaagagataggctttcgctctacaataactttctcagttcctcaatgtcaggcaaggcgttacgaagtcgttccggcatatctttggatgtacggtaagtagcgactcccatcggcttgttataatcacgaactgcaaattctacaaaagtttgattcatttctctgcaaagtattattccgatagagggattctcgtgcggttttctcacatatgaatccaaagcggaaagataagtattcagttgtcctaaatacgaactgcggaatttcccggacttcaattcaaccgccactaaagaattaagttcccgattgaaaaacaacaaatcaatgaacatttcctctccagccacttcaacacgatattgattgcctataaaactgaaatcctgcccaaaagtcataataaacttcttcacgttggcaacaatcgacttttctactatcttttcgtctaaatcctcttcctgctcatccagttcctccacattgatgaaatcaagcaagtattcatctttgaatgaacaaacagcttttagcgcttgcttagtatcaggcaatgtttgtgcgaaattgttaggcaaagttccccggtggctgtacaggtctgcttttaagtaatcccttaaagtgtatttactccaatagcgaatagcgcactcatgtatataaaatagccttgcttccaaagttttagctttggatattatttcggtatgatgactaaagccgattgaaaagaagtctgaccagttaaattcatcagccagtggctggcgaattacgctcaacagcaatttttcatctaataccaaatcgccagccagtggctggcgatttagaacaggttcccattcttcatagaaaactcgcatattctttatattcgaagttgaaaatccccttagccccggcaattctttttgcaacagagaagatatttgctctattgctcctttaccccaaaagcctatacgggaatttttcgacacgtaacgtccgatgccgtaataaagagatagctgttctttgttcaccgatgtggctgcacggtactggctgcgcagaatagcttcttttatggtctttaccgcttctctataattctgatttatatccatttgcgttttgttatatgcgacaaaagtacaaaaataatgctggcgaaaagaaaacaaaggtgtttttctcttttcgccagcatacatattttgctgttcatggaaggaacaatgctcctacagccgaatcatattctgttgaaccataatgatagctatctatacgctcctctatataagtaggaaaataggaaaaacaaaggaaaagagagatacaaacaacaaataactaaatatcaatatcttatattcactattttatctctttctttctcttcttccacaactgccagctattgatgatgttctgccacaggacatacgaaccgggagcaacagacgataacgggttcagataagtatgcgccatccagatagcaagaatcgtattcttctgccccagtgcctgcccgccactgatgcggtcattatagaccgagccgatagtctttcccaaaaagaactgcaagcaacaggcaatcaaggcaccgaccgcaatcattatttccgtgaaaccatccgcaggatcgttcagtaacgaatacagggtctgagccgtcacaatagccaaagagaccgcccacaaataaaaggcgagttcatgatatcccagtaacttctgatgcactttcggcaggaatttactcaacagccatgctgcaaggaaagggcagatcaacaaggggaacaccttactcaaaataacccaaaatgctccccaaaaacttacatccggatttacctctatcaaagggaagagaataggcaccgcaatagcagcaccgatattacccaacaatgtataagtagtcagacttgccgcactccctcccaacttggaagtaatcaccgcagcagccgtagccgtaggacaaataatacataccatcaccccctccgctacaatcttattgaaacggtaaagcaataaataagcaaggaaagcacccccgatctgaatcagcaacaaccatgcgtgcaacggtttaggcttcaaatcatgcggtgataccttacagaaagtcaacagtaacatcgtaaagataagatagggagtcagaaaagaaaagtagataaatatcggataaccgacagcacctaccagcatcgcaataggcaacgtccaattcttcaaaaacttaagcatcgtcgtatattttttcttggagatgcaaagtaacagagatttcgggagaaaagctaccattaaaccgaaaaaaacacaaaacttaagtgtaaatcatgagttttctgcaaaattctactacatttgcaccgtatttaaatatgaaaccgcatagaacctacatattatatatatcaatctgcctctggctacttgcttctcccctatgtatcggcaatttatgggggaaagatttcgtagtagtcatcgatgccggacatggcggtcacgaccctggtgccatcgggaaaatatccaaagagaaaaacatcaatctgaacgtcgcactgaaactgggaaacctgatcaaaaaaaactgcgatgacgtcaaagtgatctatacccgcagcagggatgtctttatccccctggaccgacgggcagaaatagccaataacgcaaaagccgatctctttatctctgtccacaccaacgctctggcaaaaaaccgcaccgccaaaggagcttctacatggacactgggtctggccaaatccgatgccaatctggaagtagccaaacgagagaactcggtaatcctctatgaaagcgactatcagaccagatacgccggcttcaacccgaactcggcggaatcctacattatcttcgaatttatgcaggataaatacatggaacaaagcgtacatctggcatcacttgtacagaagcaattccgccatacctgcaaacgggtagaccgcggagtgcatcaagccggattcctggtgctgaaagcaagcgccatgccaagtatcctggtagaattgggcttcatctcaactccggaagaagaacgctatctcaactcggaagccggagccaacacaatggccaaaggcatctaccacgcattcttaaactacaaaagagaacaggagatacgcctgaccggagccagcaaaacaattatcccaaccgaagaaccggcaacaaacgctccggaacaaagggaactgatggccgaagcaagtacaacacccgccaccgccacaaaaacagctcccaaacgacctattgtctcagaaagcgcaaccaatgacagcgaaataacgtttaagatacagatactcacctcctcaaagcctcttactaagaatgacaaacgactgaaaggactgaaggatgtggattattacaaagaaaaaggactgtacaaatatacgtatggcgcttccagtgattacaataaagtattacgcaccaagcgtaccatctcggcacaattcaaagacgcattcatcatcgccttccgaaacggcgaaaagatgaatgtcaacgaagcgatagccgaatttaaaaaaagaagaaataaatagaaaataaaatgaagtacattacaaaagaagttcgaataggaattgcaggtatcgtagcattatgcgtgcttgtctatggaattaattggctgaaaggcatacatatgtttcagccttcaagctatttctatgccaagtttcagaatgtaaacggactgaccaagtcgagccctgtttttgctgatggcgttcgtgtaggtattgtacgcgacatcgaatatgactatgtaaatcccggaaatgtgatcgttgaagtcgaactggacaccgaactccgcatcccgaaaggaagtagcgcagaacttgtatccgaactgatgggaggcgtacgcatgaatattcttctcgccaacaacccgcgtgagaaatatgccataggcgacaccatccccggcacattgaacaacggaatgatggaaagcgtagcgaaactcatgccccaaattgagagtatgttaccgaaactggattccatcctcacctcactgaacaacatcgtaggtgacaagagcatcccttctacgctgcactctatcgaaacgactaccgccaatcttgctgtagtcagctctcagatgaaaggactcatgagtaaggacatcccccagctgaccggcaagctcaataccatcggagataattttgtagcgatcagcggtaacttgaaggaagtggactacagcgccattttccaaaaagttgacgcaacactcgctaacgtaaaaatgattacagagaagttgaacagcaaagataacactatcggactgctcttcaacgaccctgctttatataacaatctgaacgctaccacagagaatgcggcgagcttactggaagacctgaaagcacaccccaaacggtacgttcatttctctttattcgggaagaaagacaagtagcaaatctttcttatatagattttatctaaataagcaggcggtatataaaagggagtataacctctgcaaaagtctatctacagaccgaaataatattcccgtacaaacaagtacgggaagtataaaagagtaagaataaaacgataaacaactaaaatacagatacttataattttgcaagagagggaaaacagacagtgttccaacacaattctataagtcattgaaagtaaacacattattgtttgcccgagaaaaacaagaaaaagctaatttgttttttccaaataagattcccaattttgcaaacgtagaagtttcgcttaatttaataaatgtattaaagtcactatgattgaatcaaatcatgttgtactttggaaccgctgtctcgaagtaattaaagacaatgttccagagacgacatataatacttggtttgccccgattgttccattaaaatatgaggacaaaacattgatcgtacagatcccgagccagtttttctatgaaatactggaagagaaattcgtggatttgctgcgaaagacattgtacaaagctattggcgaaggcaccaagttaatgtataacgtcatggtcgacaagacttcgattccgaatcaaaccgtgaatctcgaagcaagcaatcgttctacagctgttactcctaaaagcatcgtcggtggcaacaaggcgcccagtttcctgaaagctcctgccgtacaggacttagacccgcacttgaacccgaactataacttcgagaactttatagaaggatacagcaacaaactttcaagaagcgtagcagaagcggttgcgcaaaatccagcaggtactgccttcaatccattgttcctttacggagcgtccggagtggggaaaacacacctggcaaacgcaatcggtactaaaatcaaagaattatatgccgataaaagagtattgtatgtttcggcacatctgtttcaagtgcaatatacagactccgtacgtaataacacgaccaacgactttatcaacttctaccagacaattgatgtattaatcattgatgatattcaggaatttgccggagtaacgaaaactcaaaatactttcttccatatcttcaatcatttacatcaaaacggaaagcagcttatactgacttccgaccgtgccccggtattattgcagggtatggaagaacgtctgttgacccgtttcaaatggggaatggtggcagaactggaaaaaccgactgtcgaactccgcaaaaacatcctgcggaacaagatacaccgcgacggtctgcaattcccaccggaagtgatcgactatatcgctgaaaatgtaaatgagagtgtacgagacctggaaggtatcgtcatcgccattatggcacgctctactattttcaacaaagaaatagacctggatttagcccaacatattgtacacggcgtagttcacaacgaaacaaaagcagttaccattgacgatatactgaaagtagtatgcaagcactttgatctggaagcatcggctattcacaccaaatccagaaaaagagaagtggttcaggcacgtcagattgcaatgtacctggctaagaattatacggatttctcaacttcaaaaatcggtaagttcatcggcaataaggatcatgcgacagtgctgcatgcttgcaagactgtaaaaggtcagttggaagtagataaaagctttcaggctgaggtacaggagattgagtcgttgctgaagaagaaagcataattcaagtaataggtattaagtaataggtaatatcgaagctgcataaacaagtgcagtccgcataactattacctattacttattacctattacttatcattagaatccttgttgacgaagcactttcaacaagttctcagacataaattcattgtctttctttgtataacgtacatccgtaaatacttgtgccagagtttctttcttattttcttctataaactgtttattttccggcagtgattctttatactcgtacaagcgatcgatgtcttccggagtataatcatggtaaacttcctgatgtacggcagcttcgagaggcaagcggtccacctgggccggagtaccgtccggatagccgactgtgattgtcgtaatagggaataccagtttcggcagttgaagtgtatcgatgatcatttgcgggttataagtagtcgttcccagataacagatccccaagcctgcctcttcagccaacgtgcagaaggtttgcgcaaccaacaaggtatccatagatgcattcataaaagacattaaattatcgtagccgggaacagcgtttctctgttcacaccacttgctgaaacgacggaaatcggcacaaaaagtaagcacgacaggtgccccttttaccatcggctgattgaaatgagcaggagaaagtttctctttcattcctgcatcgcgagtcactataacactataaagttgcatccctcccatcgtagaagcgcggaaagaggtttcgagcaaatcatttaacaaatcgggagcaatatctttttgcaggtatttccggattgttcttctgttctttacggtttcaaacatatcttttttttgcaaagatacaaaaagaaatattattttgccatatcaatgaaataatctaattttctttttggaaaacttaaagccatgaacaaaaagcaaagttatctgttaatcaaagacttagcaataacaaacggaaaacttaaagcctgttgataaaatgttgcatttttattttgatagataaaaaaacattcttagctttgcaaccacatttgttactgataagtaaacttctacacattacttattaaataataaaatctaagacacattggatcgtggaaaaacaaatttattcttatgacgaagcctacgaagaatctttacgatattttcaaggcgacgagcttgctgcaagggtttgggtaaacaagtacgcagtaaaggattctttcggaaacatctatgaaaaatctccggaagatatgcattggagaattgccaatgaagtagcacgtatcgaggcaaagtatccgaatgcactgacagcaaaggaactgtatgatctgctggatcattttaagtacatcgttccgcaaggaagcccgatgacgggtatcggtaatgactatcaggtcgcttcactatccaactgcttcgtaatcggggtagacggcgcagcagactcttatggcgctatcatcaaaatcgacgaggaacaagtacagctcatgaaaagacgtggaggagtaggtcatgacttgtctcacatccgcccgaaaggttctcccgttaaaaattcggcattgacttccactggtctcgttccgttcatggaacgttattccaactctacccgcgaagtagctcaggacggtcgtcgtggtgcactgatgctgagtgtgtctatcaagcatccggattcggaagccttcatcgacgctaaaatgacggaaggaaaagttaccggagccaatgtttccgtaaagctggacgacgctttcatgcaggcggcagttgacgagaaaccttatatacaacaatatccgattgaatcggcaaatccgactaccactaaagaaatagatgcttccaccttatggaagaagattgtgcacaatgcatggaaatcggcagaacccggtgttttattctgggatacgattatccgtgaatctgtgcccgattgctacgcagatttaggttataagactgtatctaccaatccatgcggtgaaattccattgtgtccttatgactcttgccgtctgctggctatcaatctatattcttatgtagtaaatccgtttaaaccggatgcctattttgatttcgaactgttcaaaaaacacgttgcgctggctcaacgcatcatggacgacatcatcgacctcgaactggagaagatcgaacgtatcatggaaaagatcgatcaagacccggaaggcgaagaggtaaaacatgccgaacgcaacttgtggaacaagatatataagaagagcggtcaaggtcgccgtacaggtgtgggaatcactgcagaaggcgatatgcttgctgctttaggtctgcgctacggaaccgaagaagcaaccgaattctctgaaaaagtacataagacagtggccctcggtgcctatcgttcttcggttgaaatggcaaaagaacgcggtgctttcgaaatatacagcaatgagcgtgaacagaacaatccgttcattcagcgtcttgccgaggctgatccggaactgtatgcagaaatgaagaaatatggccgtcgtaatattgcatgtctgacgattgctcctacaggaacaaccagtctgatgacacagacgacttccggtatcgaaccggtcttcctgcccgtttacaagcgcagaagaaaagtaaacccgaacgatacgaatgtacacgttgactttgttgacgagacaggcgacgcattcgaagaatatatcgtattccatcataaattcgtgacatggatggaagctaacggatacgatcccgccaagcgttattcgcaggaagagattgacgagctggtggctaagtcaccttattataaagcgacttccaatgacgtagactggttgatgaaagtgaagatgcagggaagaatccaaaaatgggtagaccactctatcagcgtaaccatcaacctgccgaacgatgtagacgaggatcttgtcaaccgcctgtatgtagaagcatggaaatccggttgcaaaggatgtacggtataccgcgacggctcacgttccggagtattgatttcaaccaaatcggataagaaagaaactcttcctccttgcaaaccgcctacggtagtagaaacacgcccaagaatactggaagccgacgtggttcgtttccagaataacaaagagaaatgggtggcttttgtaggactgctggatggacatccttacgagatattcacaggtttgcaggatgacgatgaaggtatcctgttgccgaaaagcgtaaccagcggacgtattatcaagaatatagacgaggatggaaccaagcgttacgacttccagttcgaaaataaacgtggatacaagacgactatcgaaggattgtcagagaagttcaacaaggaatactggaactatgcaaaactgatctccggtgtactccgttaccggatgccgatcgagcaggttatcaagctggtaggttctctgcaactaaacagcgagagcatcaacacttggaagaacggtgtagaacgtgcattgaagaaatatattcaggacggaacggaagccaaaggaaagaaatgcccgaattgcggtaatgaaactttggtctatcaggaaggctgtctgatctgtaccacttgcggtgcttccagatgcggttaacatgtgacgtatgttaattaatatataaacaaaagattaaaaggagtcctaatacggctccttttattttttattcaaaaaaatgtcttatacttgcatagtcattagtgtctaatcaaaatctaatatatatgactgtatcatttaacatcgaatatcgcaccagttggggagaagaagtcaggattgccgggctgctgccggagtcgatccccatgcataccacagacggcatatactggacggcagacgtggaactggaagttcccaaagaaggaatgactatcaattacagctatcagatagaacaaaaccaaattatcatccgcaaagaatgggacagctttccgagacgtctctttttatccggtaactctaaaaagaagtatcagattaaagactgctggaaaaatatccccgaacaattgtattactacagttcggccttcacggaagccttgttagcccatcccgacagagctgaaattccgccttgtcacagaaaagggctggtcatcaaggcatacgccccacgcatcaacaaagactattgcctggcaatttgcggaaatcagaaagcattgggaaactgggacccggacaaagcgattcccatgagcgatgctaactttccggaatggcagatcgagctggatgcaagtaagctgaaattcccgctggaatacaaattcatcctttaccataaagaagaaaagaaagcggactgctgggaaaataaccccaaccgctatcttgccgacccggaactgaaaacaaatgagacgctggtcatctccgaccgatatgcctatttcgatattccggtatggaaaggggccggtatagccatccctgtcttttcactgaaatcagagaacagtttcggagtaggagatttcggagatttgaaacgcatgattgactgggctgtaagtactcaacaaaaggttatacagatattaccgatcaatgatacgaccatgactcatgcgtggaccgattcttatccatataatagtatctccatttatgctttccacccgatgtatgcggatataaagcagatgggaacactgaaagacaagtcagccgcagcgaagttcaacaaaaaacagaaagaactcaacggcctgccggcgatggattatgaagctgtcaaccaaacgaaatgggaatacttccgactgatcttcaagcaggaaggagaaaaagtattagcctccggagagttcggcgaattctttaatgccaataaggaatggctgcaaccttacgctgttttcagctatctgcgcgatgcctttcagacacctaatttccgtgaatggcccagacattccgtttataatgcacaagatatagagaagatgtgccggccggaatctgtagattacccgcacatcgcactttattattatatccagtttcacctgcacctgcaattggtagccgctacgaaatacgcccgcgaacacggtgtcgtactcaaaggagatatccctatcggcatcagccgcaacagtgtggaagcatggaccgaaccttattacttcaatctcaacgggcaggcgggcgcccctcccgatgatttctcggtgaacggacaaaactggggattccccacgtacaactgggacgtcatggaaaaggacggctaccgctggtggatgaagcgtttccaaaaaatgtcagagtacttcgacgcttaccggattgaccacatcctcggtttcttccgtatctgggaaatcccgatgcatgccgtacacggattactcggacagttcattccctccatccctatgagtcgggaggaaatcgaaagttacggactcccctttcgggaagaatatttgattccatatattcatgaatccttcctcgggcaagtattcggtccgcataccgattatgtgaaacagacttttctgcttcctgccgaaacacccggtgtttatcacatgaaaccggagttcaccacccaacgggaagtggagagtttctttgcaggaaagaatgatgaaaacagtctttggattcgggatggactatacactttgatcagtgatgttctttttgtaccggacacgaaagaaaaagataaatatcatccgcgcatcggaatacaacgcgatttcatcttccgttcactcaatgaacaggagcagaatgcgtttaacagactgtatgatcagtattattatcaccgccacaacgagttctggcgccaacaggctatgaagaaactaccgcaactgacacaatcgacacgtatgctggtttgcggagaagacctgggtatgattccggattgtgtttcgtccgtcatgaatgatcttcgtatcctcagtctggagattcagcggatgccaaagaatccgatgcacgagttcggatatttaaatgaatacccataccggtcggtttgtaccatctccactcatgatatgtctactttgcgaggctggtgggaagaagattacctgcagacacagcgttactacaacacgatgctggggcattacggaaccgcaccgacagtcgccactcccgaattgtgcgaagaagtggtgcgcaatcatctgaaaagcaattccatactttgtattctgtccctgcaagactggctgagcattgatggcaaatggagaaatccgaatgtgcaggaagaacggattaatgtaccatccaatccgcgcaattattggcgttaccggatgcacctcactctggaacagttgatgaaagcagaagaactcaatgacaagatacgtgagctaataaaatacaccggcagagctcccaagaaataaatatctttaggcacgggtgacacggattaacacgttttttagacctataatctcttaaaactgtaaatccgtgtcatctgtgcctgaataaaatcaactgatagttttgacacctccgtttctctcccatgcggcaattctttatcttccttcattccgttttttccaattaatcaagtatctttgcaacgcaaaaacgcaacgcaaaataaatgggagacaatcagcatcggcgtattgattttgtggacttaaccaagggagtctgcattattctggtagtgatggcgcatatcggaggcgctttcgaccaacttgacaagcattccatgctatcctgctttcgcatgcctctctatttctttatatcaggaattttcttcaagccttatgaaggattatacgggttcattatccgaaagaccaataagctaatcattccctttatcttcttctacgtcagcgcctttctactaaaatacattgtatggaagattgcaccgggaactttccatctccctgtgtcatggagagaattactgtttgtctttcacgggcacgacctcatcaagttcaatcctcccatctggtttctgcttgctctgttcaactgcaatatcctgttctatctgattcattatctgcgtgacaagcatttatctctgatgtttgcagcaacgttactgatcggatgcacaggattcttcctgggcaaatttcacatcgaacttcctttgtatatagacgttgccatgactgccctccccttctatgtggcaggtttctgggttcgccgatataatttcttcctgttccccagtcatcggttcgacaagattattccctcatttgtcctgctggcactggtcgtaatgtacttcaccgccaccacgccgggtatgcggaccaacaattatcccggcaacatattccaggtatacattgccgcatttgccggaatctttatgattatgctgatctgtaagaaaataaaaagaataagcatcgtttcttatctggggcgatattccattatcacactcagtattcatggaccgattatacactttgcaagaccggtcgtttcgcattatattcataacgactgggcagaagcaagcgcactgctcctgttgacattggctatctgcattctctttacccctatcctgcttaagataattccacagttggtagcacagaaggatttattaaaagtcaaataataaaacattgtgcaagccaaacttttcttaactctaagtttaattatcaaataatttactacttttgttccaaagaactatagaccgagaacaaatgaatataacgattgtcttaggagataaaattccatctataaaatacggcggaactcaaagagtaatgtggtatctgggtaaggaacttaataagcgcggacacaaagtcaccttcatcgcaggaaaaggttcctcctgtcctttcgctaaagtgatagaactggaccctagcgtaaatctgaacacccaaatccccacagacgcggacatcgtacatttcaacattcccgttcccgaaggaatcaccaagccgcacttactgaccatacacggcaatggaatcccagccaacgcagaccggaacatcgtttttgtctcacgtaatcatgcacaaagactcggaagcgaatcattcgtttacaatggactggactgggatgattacggtcctgccaatctcaccctctccagaaagaactaccattttctgggcaaagcagcctggaaggtcaaaaatatcaaaggagctatcgctgtcgtccaaagcatcaggaacgcacaactggacgttttaggcggttatcgcctcaatctcaaaatgggcttccgattcacatggaatccacggattcattttcatggaatggtagatgattcaaagaaaaaagttattattgagcagtcaaaagggcttattttccccgttacatggcacgaacctttcgggctggcaatcacagaatccttatactttggagctcccgtattcggtactccctacggggcgcttcccgaactcgtttcaccggaagtcggttttctgactgctcacggacaggaaatggccgaacatatacagtcagcacaatattctccgaaagtctgccacgaatatgccagagatttattcaattcaagcgtaatggcagaagcctatttaaagaaatatgaaactgtactgaacggcgaacctttgaataaagaagtcccccatattatagatatcgcacgacgtcttccatgggactaaaaatggcagttgaattacatagctgatgagtaaaatctcatttaaagcctttcattcatttaataagcgaacaaaaatgatcgaaaacactttataaaaagaaataaagccttacctttacttttttagaaaacaaaagatatgaagataaacaacagctatattttgctgaaagacatctgctgcttcgcttatcatggagtagctccccaagagaatatcattggaaatgagtatcttatcaacttgaagttgaaggtagatatcagtcaggctattcaaacagacgacgtggtggatacggtcaactatgccgaaatacacgaagccgtgaaagctgaaatgtccatcccgtcgaagttgctggaacacgtatgcggacgaatagctaaaagactactggcagaatttcctgccattgaagaaatagaacttcgtctttccaaacggaatccgcctatgggagcagacatcgactcagccggagtagaactgcattgcagcagataagtacctttgctttatcagtttgtgttattatcaagaagcacatcggtctgtcatcctatcattcggactgccacatccggtcaacttatttacaacaccctatcattccgcttgtgccaagtaatgggcacagttatgccaaaggagtgtcacggttgtgacaagggtgtggcacagttgtgacaaaggcgtggcatcgtcgtgccaaaggcatggcacaagtaaggctgcctcatttctacttgaagcagcctcacactatcatattttcagtctataacgacctatctcttctttctttttcttttatttaccgattctacagcttccgttaccacggatttgttttcgaaccgtttcgtataactggaataatccgggtgagtacgttcgtaatcgggatccataaacagagggctggaaatgatatgatccgccgtagaacggttacaacagaaaacgatgttctcaacaccggcgagtcgggttaatgctttaacatccgtatcatgtggctgcaaagtcatagggtcagtgaaaaagaatagataatcaatctgaccgtccacaatacgcgatcccatctgctggtcacctcccaaaggaccggatttcagaattgtgaagtcccattccacttcaggatgcttctccttcagtgcttccagaatcagagtacctgtagtacctgtacaatagaatttatttcccatcaacagttccgagttccacagcacccattcgatgaggtcttttttcatggcatcatgtgctaccagcccgatgcctctccttacttttggttccattttgttatccttttaaatccgacaattgagagaatcttttgcaccctcccacataaaactgccacaagatactactttttatccgttcagggattggattcaaagaagtttttcttaagttttctttacgggaagaagaaaatgaaggacaaatctgtttatattctttccgggcacgcatcaccgcacgggcgttgtccaactgccccttcagcagaaatgtgaatgcagccacgtaatcgagacaagtccggatacgcatcactttatttaactcttcgtccgaaagattcttatagagcatgacaagattattacgaaaattcaaaaaagtcttgcggggattctcctttttcagagttgcaccaccgacgtgatagaccgtactttgaggaatgcaaacgatttcccgaccacgggaacgtagtcgccagcataaatcaatctcttccatgtgggcaaagaaacgtccgtccagtccgcccgcctcacgataatccgcatgacggataaacagggcggctcccgttgcccagaaaactggcaggatcgtatcatactgtccctcatccttttcaaccactcccattatacgcccacgacagaacggatagccgtacttatctataaatcctccggctgctccggcatattcaaaatactctttttgccgctggctacggattttcggctgacaggcagctacctccagatggccatcaagataggagatcatcggttcaagccaatgttcggtcacctcaacatcagaattcagaagtaccacatactccgcttctacctgctgcaaagccaggttatatccatctgcgaatccatgattctgatccagcacaatgatccggacacaaggaaattcctcccgaagcatttccacagaagcatccgtagagccattgtcggccacacagacttctacttcttcgctcttcgaatagcggatcacggacggaagaaaagtacgaagcatatcgcacccgttccaattcaaaataaccactgacactttcatccttaccccctttcacattcagccttagaagctttccaacgtttatgagaccacagccaataagccggttccctgcgaatcgtctgttccagataatcagcaaacatttccgtaatttctccttcacccgtctccttcggtttctctgtcatcagcttaaactcagctacgcaataccctctgccgggttttgtcagatcacaatagaacacagggaagttcatcattttcgcaatgcgctccgcaccattcagaaaggcggtttcctgccccaaaaaagtagtccagtatttttcgtttccgctgggccactggtccgtaatcagaccgacaaccatctttttgccttcgcgcttcaacttgataatttcgcgtgccgtagaatgtttcggaacattataacctccgaagcgggagcggatgcgttgaaacaattcattcagatacttatctttcagaggcttatagacttgcatcggtacatcacccggcttcataatagatcccatcccgatcagccattcataattggcatagtgaggaatcattacgatgattccgccatatttctcggtcagttccagatattgttccgtattcttataagtcatccgcttatacaggtcttcgggtgacatatgaagcattttcaagtcttcaagcatatagtcggaaaggtaacggtagaaacggcgttcgatctgcagcctttcttccttgtctttctcgggaaaagatttcttcagattctcccgcactactttccggcgatacctccctatacggtacatcaacaggtaattgaaatccgaaagtaagtacaacatccggaagggaagcgccgaaaacagccacatcccgctatataccagccaatagataaatctagacttcataattcatcagaattgtgcctttaagcgctgtcatatcttcattaaattctcccagtcggacgttaatcatctgattgtccaatgattcgtcattctccacttctacgcggatatagttagcggtaaacccatgcatcggcgtacctgcttttgatttttccatcaatacctgcatggtctgcccgatatggcgggcatagaaagcctgcgtcttttcatcagaaagtgtcagcaagcgctggctgcgctgatgtttctcttccggcgaaaccacataatctatcttcagggcctgcgtccccggacgttcggagtagctgaacacgtgtaactgtgtcacatccagtccggaaataaactgataagcctgttcaaaatactcttccgtctctccgcgagtacctacaattacatcgactccgataaaggcatccggcatcacttccttgattttctttactttagaggcaaaaagagccgtatcataacgacggcgcatcaatttcagcacttcatcgcaaccggattgcaacgggatatgaaaatgaggcataaatctacgggaatgggaaacgaactcaatgatttcatcagtcagcagattgggttcgatagaggaaatacggtagcgttcgatgccctctacttgatccagcgctttcaccagatcaaagaaagtctcaccggtagtcttaccaaaatcgccgatgttcacgcctgtcagtacgatctcttttccaccttcggcagcggcctgccttgcctgctccaccatagaggcaacagtaccgttacggctgcgtccacgggcaaaaggaatggtgcaataagaacagaaataatcgcatccgtcttgtactttcaggaagaaacgggtacggtcgccccgtgaacacgaaggcgaaaacgaacggatatctttggtggtggtagtaaatgcctctccctcttcatgcttatggaggtcgccgagatactgcaacaagtctcctttctgctcggcacccagcactacatctactccttttatctttgccacgtcaccgggcttcaactgtgcgtagcatccggtcactaccacgaaagccccgggatgctgcttgaccaaccgatgaatagcctgacggcatttcttgtctgccatctccgtcaccgaacaagtatttaccacacagatgtctgctttttcccctttacgtgcagtccggactcctgcctcccgcaggattttgccgatagttgaagtctctgaaaagttcaatttgcagcctaacgtataataaacggctgtcttattttgaaatacagtggtatctatcataatctgttataacgcatatttcctgcaaagttacacattattattagtaaaacactttaggatacgaaagtttattcctatttttgcacaattcactaaaaaacgtgcaatgattaaagagaatttcattaaactatacgaaaatagttttcgggaaaattgggatttaccttgctataccgattatggtgaatccgttcattatacttatggtcaggtagccggagaaatcgcccgtatgcacctgcttttcaaacattgcagcctgcgcagaggagataaaatagccgttatcggcaaaaacaatgcacactggtgtatcgcctatatggcaaccatcacctacggagccatcatcgtccctatcctgcaagactttacgcccaacgatgttcatcatatcgtcaaccattcagagtctgtcttcctgtttaccagcgacagcatctgggaaagcttggaagaagaaaagctgaccggactgcgcggagttttttcgctcaccgacttccgctgcctttatcagcgggacggagaaactattcagaagtttctggcacacctcaatgatgaaatgtacgctacctatccgaaaggattcacgcgcgaggacattcaatacactacattgtccaatgataaggtaatgttgctgaactacacatcgggaactaccggcttcagtaaaggtgtaatgctgacgggcaacaaccttgccggcaatgtcactttcggcatccgcaccgaattacttaaaaaaggagacaaagtgctttctttcctgccactggcacacgcctacggttgcgcttttgactttctgactgcaactgccgtcggaactcatgtcaccctgctcggtaaaacgccttctcccaaaattatcatgaaggcttttgaggaggtaaaaccgaacctgattatcactgttccgctggtcatcgagaaaatatataaaaatgtcatccagccgctcattaataagaaaggtatgaaatgggcattaaacattcctttgctcgacacccagatttataatcagatacggaaaaagctgatagacgccctaggcggacgtttcaaagaaatcatcatcggaggcgctgccatgaatcaggaagtggaagagttcttctacaaaataaagttccctttcaccatcggttatggtatgaccgagtgcggaccactgatcagctatgctccctggaatgaatttattttaggctcttccggcaaagtgctggatatcatggaggcacgcatctataaagaaaatccggaagcggaaaccggagagattcaggtacgtggtgaaaacgtgatggtgggatattataagaatccggaagccacgcaggaagtgtttaccgaagacggctggctgcgcaccggcgaccttggtactatggacgccagcggaaatatcttcatccgcggacgactcaaaagcatgattctgagttcgagcggacagaacatcttccccgaagagctggaagccaaactcaataacctgccattcattcttgaaagcctcgtcatcgaacgtaacaagaaactggtggcactggtctatgcggattacgaagcgcttgattctctcggattgaacaatccggataacctaaaaaccatcatggatgaaaatctgaagaacttaaataataatgtagctgcgtatgaaaaagtcagcaagattcagctttatcctacggaatttgagaaaaccccgaaaagaagcatcaaaaggtatctatataacagtatagctgtcgattagtatgttttaaaacatggattgaaggcgtaatataacaagcttctaaaaaaaattataaaaatagttggcttttcgagaacaacatattgaaaaagtacataactttgcagcgttttaataaagcaattgattgtattacgtttttaaaaagcaaagaaaatgaaaaaattagttttgatggccgtagctatcgtagcagtatcattcgcatcttgtggtaacaaagcagctgacgcagcaaaagctcaacaagattctatccgcatcgctgactcaatcgcagctgtagaagcagcagcagctgaagcagaacaagcagcagctcaggcagcagctgactctttgaatgcagatagcactgcaactgaagctgtagctgaataattcagaacagcctagagagaattgaaagtctgacatgctaaaagcatgcacagacttttttttatgccttatttagcgtatgagcttttcacaaagggagcatccagcaaataatccagacttacctcgacacttttctctacgggcatgctgtagctttctatctctgcaacaagatgcttcacaccagctgtctttgcattcttgaaaatagcgtcgaaaccaaccattccgctctgcccgatttctctgtgatctttgatatggaacattttaaaacgaccggggtatttattaaaataatcgaccggactgttttgtccgcgaactacccaataaacatccatctggaagaaaacatattcaggattggtatgctcaatcatgtaatcatacatcactttatcttctaccttctgaaattcatgagcatgattatggtatccgaacgacatcccctgctgtttacaacgtttgcctatttcattgtaataagcacaatatgtatccaactccttaagtgttttaggcacatccatccaaggagctacaatgtaactcataccggcagctttatgatcagcaatacactggtcccaccattgaagtgaacttgaaaaatcaccggaagctaattcttctttcgacaatcctcttgtgcaatgtgaggataaaaccttcagcccggcagattctacatcttttttaaattggtcgggagttctgtcgtaaaactttccattattataattggcggcttccacactggtatatcccattttcgccaagttcttcagaagagtaatataagcggcgtcacatttgccgtccttattgtctaccttattcaatatatccctgacagaatagagttgaatcgctacttcttttttagcttttgctttcgcttttgttttagactgtgccatggccgtaaacgaaatcattaaaagaagagccagcgcacatagatttatttggagtttcatgtttgtagataaaggggttcatgtattaaaataaaaaagctgtgtcagaagttcgtcgggcatatcattctgtcattcagaactaaatgccatgttgatgttacttttgacacagcctatctttgaattatttatgtgatcagtccagaactttcacacggatattgcggaaccaaacgtcatcaccgtgatcctgcattccgataaatccttcgtggttttcgccaccgcaattattcagcagttcgaaagccaacggccatttgtcctggctgaacttgctggcctgcaaaaggtcagtccattgtttagtccacaagtgatattcgagtacattctcgtcattctgtccgtgaacaaccgtacctttataaaccatgatcttagccttgttccattcaccgaaaggtttcgcattctgaggaactgccggaatcatgtcatataaagaagccgactgacggttattgtctttacccaattttgcatccggatgattgtcattgtccaatacctgatattcaggtgcggaaatatagatcggttcgagcacgtcgttgccgtccttatctttagaagtcacttcttgagccagatagaagataccggagttaccgcctttggaaaccttccattccatttccagttcgaagtttttgaatttgtgggcaaagatcaggtctccgccatcaccatcctgtgcttcaccgccaccggaaccgttaaacttgatgcaaccgtcttcgatagtccatttggaaggaactctgtccttgccataaccacgccatccattaaatgt

SEQ ID NO: 4641 - DNA, 1821 bp, Unknown
  gut microbiota DNA sequence
aataaaaccatgtcagacttttcaagaagaaaatttcttaaaacgggagccgctgctttagcaggaatcaccattgctcccagttctattttaggtatgagccacgggcacgtttccccaaccgacaaactgaacctcgcagccgtaggtatcggcggtatgggccatgccaacatcaacaacgtgaagggcaccgaaaacatcgtagccctttgtgacgtagactggaaatatgccaaaggcgtattcgatgaattcccgaatgcgaagaaatactgggattaccgcaagatgtacgatgaaatgggcaaatccattgacggcgtaatcattgctaccgccgaccatactcatgccatcatcacggcagacgccatgacaatgggcaagcacgtatactgccagaaaccgttgactcactccgtttacgaatcccgtttgctgaccaagctggccgcctctaccggagtagttactcaaatgggtaatcagggagcatcgggcgaaggtaccgacctggtttgcgaatggatatggaatggagaaatcggtgaagtaaccaaagtggaatgcgccaccgaccgtcctatctggccgcaaggactgaatgcccccgaaaaggcggaccgcatccccaacacattgaactgggatcttttcaccggacctgccaaactgaacccgtacaacaacgtttatcatccctggaactggcgcggatggtgggattacggtacaggtgcactgggcgatatggcctgccatattctgcatcagccgttcagagctctgaaactgggttatcctaccaaggtggaaggttcttctacattattactgagtgcctgcgctcctcaggcccagcacgtgaagatgattttccccgcccgcgacaatatgccgaaagttgccttgccggaagttgaggtacactggtatgacggcggtatgatgccggaacgtccgaaaggtttcccggaaggaaaacaactgatgggccccggtggtggtctgactattttccacggaacaaaagatacattgatttgcggctgctacggagaacaacctttcttgttgtcaggccgtgtgcccaatgcaccgaaagtatgccgccgtgtcaagtgttctcatgagatggactgggtacgcgcttgtaaggaagacaaatccaaccgcgtgatgccgaaagcggatttctccgaatcgggaccgatgaatgaaatggtggtaatgggtgtattggctatccgtctgcaaggattgaacaagacactggaatgggacggcgctaatatgtgcttcaccaatatcggtgataacgaaacactcagaacctgcattaaggacggatttacgattcatgatggtcacccgtcattcaacaagacctggacagatccgatcaacgcgaaacaattcgcagccgaactggtgaaacataactatcgcgaaggatggaagttgcctgatatgccacgataacacgataaaagtaagttaagaattaaagattaaaaattaaatagttattattatgaagaaagtattttatccattagcttgttgtcttgcagcgggagttttagtttcctgcagcggtcagaagaaatccgggagtgctcaggaagagcaatcggcaaacgaagtagcattatcatattcaaaatcattaaaagcagcagagatggatagcttgcaattaccggtagatgcggatggttacatcactatctttgacggcaaaacatttaatggatggcgtggttatggcaaggacagagttccttccaaatggactatcgaagacggttgcatcaa

SEQ ID NO: 4642 - DNA, 2156 bp, Unknown
  gut microbiota DNA sequence
tctcggcatcacattcagcaataatatactgaatgaaaacaatgctttccagcttttcgtagacaagaaagaagatttagcaggattgcccgaatggttctgccaaagcgcagccgaagaagcaaaagctgccggacaaccggggaaatggctgttcaccctgcacaacgccagccgccttccgttcctgcaatacgctgagaaccgccctctccgtgagaaaatgtacaaagcatacatcaaccgcggcaataacaatgacaagaatgacaacaaagaaacgatccgcaagatcgtctccctccgcctggaaaaagcaaggttattgggcttcaacaactacgccaacttcgtactggatgaaacaatggcaaagaatgacagcaacgtaatgagtctgctgaacaacctttggagctatgccctcccgaaagcgaaagccgaagccgcagaacttcaacagttaatggacaaagaaggtaaaggcgagaaactggaagcttgggactggtggtactacacagaaaaactccgcaaagagaaatacaacctctccgaagaagacaccaaaccttacttcaaactagagaatgtacgcgaaggagctttcgcagttgccaacaaactatatggtatcacgctaagcaaactggaaggtatcccgacctatcatccggatgtagaagtcttcgaagtaaaagacgctgacggctcccaactgggtatattctatgtagactatttcccgcgttccggaaaaagcggtggcgcatggatgagcaattaccgcgaacagcagggagcaacccgccccttggtatgcaacgtatgcagtttcaccaaaccggtcggcgacaccccttctctgctgactatggacgaagtagaaactctgttccatgaatttggccatgccctgcacggcttgctgacaaagtgcgaatacaaagggacctccggcaccaatgtcgtacgcgattttgttgaacttccttctcagatcaacgaacattgggctaccgaaccggaagtgctgaaaatgtatgccaaacactatcagacaggagaagtaatccccgatgaaatcatcgaaaagattctgaaacagaaaacgttcaaccaaggattcatgaccaccgagttactggctgccgccatcctcgacatgaaccttcacatgataacagatgtaaagaatctggatatacttgctttcgaaaaagaagccatggacaagctcggtctgatccccgaaattgccccccgttaccgcgtcacttacttcaatcatatcattggcggatacgctgccggatactacagttacctttgggcgaatgtacttgacaatgatgcctttgaagccttcaaagaacatggaatctttgataaaaatactgccgacctcttccgctacaacgtattggagaagggagacagcgaagatcctatgatactttataagaatttccgcggtgcggaaccaagcctggagccgttactgaaaaacagaggaatgaaataaaacggcaaaaaagcccttaaacatcaaatatttgagggcttattacatatgaatgtgaaaaaaaaactatatttgcagccttgtatgcggcaaaatggacttgtatacggcagaatttaactgaaaattaaattaaaaaagtaatcatcataaattaaaagtaaaatgcaaaacaaaggatttgtaaaggtttttgcggtactactcacgctggtatgcgtgttctacctctccttctccttcgtaacccgccattacactaataaggcgaaagagattgcgaacggcgacccgaaagtagaacaagactaccttgactctctctccaatgagaaagtaatgctgtggaactggacgctgaaagattgtcgtgaaatggagatcagtttaggtttggacctaaaaggtggtatgaatgttatccttgaagtttctgtgcctgatgttatcagagcattggctgacaacaagccggatgaaaacttcaataaagcgctgaatgaagctgcaaaacaagctgtcaacagccaggacgatatcattaccttgttcgtcagagaataccagaagactgctccgggcgcaaaactttccgaacttttcgcaacacaacagttgaaagataaagtta

SEQ ID NO: 4643 - DNA, 18191 bp, Unknown
  gut microbiota DNA sequence
aagataaagttatgaagacaaatcaactcagagcaatgatgctcacggtgatgttagtgattactacattgggtggtacggtatgggcgcagcctttgatcgtaaagggaacggtgaaggacggatcagacggttcgccgttggtaggatgtgcggtgacggtgaagggaacatcccgtggaactgttacgaacctacaagggcagtacaggattgaagcaaacaagggggaaactcttatcttcagctatattggttttgagaaagtggaaaaaatcatattctctgcaaagatggacgtaagccttatggctagttctgatgttttggaagaatgtgttgtcgtcggatacggcagccagcgaaaggtagctgttaccggcgccatatcaaccgtcaatctggcaagtctcagacacccgtccgtacgtatggatgcagtaaatacggaagaatataaatcgatcagtgaaaatggttttaagcaggtaggagaatctccgctttctactttctctattgatgtggatgccgcttcttacagtaatatgcgtcgtatgatcaacagcggtaccttgccggtgcctgatgctatccgtacagaagagttagtgaattatttctcctacgattatgcgaagccgaccggaagcgatccggtgaagattacaatggaggctggtgtttgcccctggaatgctgatcatcgtttggtacgtatcggactgaaagcaagggagattccgactgacaaacttccggaatctaatctggtattcttgattgatgtatccggttctatgtggggacctacccgtctggatttggtgaagtcatctctgaagctattagttaataatctgcgtgataaagataaggtagccatcgttgtatatgcgggcaacgccagcgtaaaactggaatctactctgggcagtgacaaacagaaaatacgtgatgcgatagacgaactgacatccggtggctctacggccggtggcgcaggtatccaactggcttataaagtggctaaacagaacttccttcctaaaggaaacaatcggatcattctttgttccgatggagatttcaatgtaggtgtttcttctgtggaaggtttggaacagctgatagaaaatgaacgtaagagcggagtattcctgagtgtgctaggttatggaatgggtaactataaagacaataaaggtcaggctttagcagaaaaagggaatggaaatcatgcttatatcgataatttgcaggaagccaatcgtgtcctggtgggtgagtttggcgctacgcttcatacggtagcaaaggacgtgaagctgcaagtggaatttaatccggctcaggtgcaggcatatcgtctggttggttatgagagccgtttgctgaaagacgaagactttaataatgacgccaaagatgccggagaattgggagccggacatacggtgacagctttctatgaagtgattcccgtaggcgtgaagaatgactacgtaggaaaggtagatgatctgaaatatcagaagaaacaaaaagagacagtgcagccgaccggctctaatgaattgctgactgtgaaactgcgctataaagctccggacaaggacgtcagcaaaaagatggaagttccctttgtggataataaaggaaataatgtttcttccgatttccgtttcgcttctgccgtggctatgttcggtcagctgcttcgggactctgactttaaaggagcggcaagctatgataaagtgatcggccttgccaaacagggactgaataatgatgaaaaaggatacagaagagaatttatccgtctggtagaaactgcccaagggatgaaacgggagatagcggaaaagaagtaatagtataggttaattaaaaggatgattagcatagatcaatgtatggtttcgcattgattagttcgttccatatacgtttccctttcgttcgacctaggtgggactaaacgatcacctgggtcgaactaaaagataacctaggtggaacgaattaggatttgcataaattttaaatagaatctgcaatgcaattactaagctatggactataaaagagaaaccgcagataatcgacgattacctgcggtttacttctgcacgggaggagaggctcgaactcccgacacccggttttggagaccggtgctctaccaactgagctactcccgtgtttgcggctgcaaaggtagtataaacttccgaaccagcaaatattagggtaaataaatttccaattattttaatttttcccattcatcgggcttaaaacctaccagaacgaagctgtctgtcactactaacgggcgtttcaccagcttaccgttcgttgccagcaatgcgatttgttcttcctcagtcatggaaggcagcttctcgctcagtttcagctctttatatatcaaaccacttgtgttgaagaatttctttattggcaatccgcttcgtggaatccacgctttcaactcttccactgtagggttatcttccacaatgagccggttagtatactcaatgttattttcgattagccatttcttagctttctggcatgtactgcacgccggatattgcaaaaataaaggtgtcatactatatactatttatcgattaatacctaatacttattacttaatacctattacctaaataaccatctgcaaatcctgatacataatccgataggcggcggcttttttatctaatgcaagcgggtacgcccgtgaggaagaaggcatccggtagagtctcatcgcccgtccttcaaacacaaattcggcatagtctcctactttcggttcttccacttccagttgtgcacggagcgtatccgttgccttctgtccggtggtgacgattgctctgcattcgggaagttggcggagtaatgcggcaatgtccgtcggctgcaccacttccagaaatttgtccgaagcgttatcctgcagacgccggatagatgaggctgtatcgaacagggcgattcctttttcattcaggaagtcaataatctgttcccggcagaatgctttccgcgtatcgttcagaaagtgatctttatctccgaaaaacaagagtccgacaatgcgccacatatcattgttcaggttcggataataaaaatccatcgaccaccgttttctttgtggcggaaaacttcccagcatcagcagctttgcttttggcgggagaaagggttctaaaggatgtttttcgatttcaatctccatattgatgtaatttcctacaaaaataacgaatctattcttttccctcaaaatagttacggaaaaaaacaaatttaaaaatatttggctatttttgcacggagatggtgaaaaacaacttattgaaatgctgttgaaaacaagaataattataagttgctgttttataagcttgttagctttctttgaagaagattgttatgcttcacggccggggtcgaaagaatgtgtgaaagtttcctctgccagttttacggtaagggggcgggtcatcgatacctatggtgaaccacttatcggagcgacaatcagagagaaaggcggagcgaatggaacagtgacagatgtggaggggaatttctttttatccgttccggatagtgctgttctgcaaatttctttcgtaggttacgagtctcaggaagtcagtgtaaagggtaggtcaatgcttgaaatatgtctgaaagaaaatattctgctgcttgaccacgtgattgtaactgctttggggcttgaaaagaaagaatcctctttggcctatgccgtgcaaaaggtgaggggagaagaactgaatcgtgtgaaagaagtgaatatgatcacggctttggcaggaaaggcagccggtgtgcaggtcagcaagaactcttccggcatgggcggatcggcgaaagtcagtatccgtggggtacgatcggtggccggtgataatcagcctctgtacgtgatagatggtgttcccatgttaaattctacttcggaacaggcttattcggctatcggcggtacggcaaatgccggtaacagggacggaggcgacggtatctcaaatctgaatccggaggatgtggaaagtatcagcatcctgaaaggagctcctgccgcagccttgtatggtagccaggcggccaacggagtcattcttattactacaaagaaaggaaataccgtaggacggagggatattcatttctctaccggactgacttttgaaaaggctttctctctgcccgaaatgcagaacagctacggagtaaatgatgtaacagacagttggggagaaaaagaaaatctgacggtttacgataatttgggtgactttttccgtaccggactgacgtcgatcacttctgtatccgtcaactccggaaatgacaagctgcaaacatatttctcctatgccaacaccaccggtcgcggcattctgaatgaaaataaactctccaaacacaatatcaatctgagagagaccgccgtcctcttcaacagcaggctgaaactggacggtaacgtgaatgtcatgaagcagacggtgaagaataaacccgtatcgggaggcttttatatgaatccgctggtaggtctataccgctttcctcgtggcgaggacttggcttattataaagataactatgagcgttatgacgaggacagaaagctgaatacacaaaactggcatacttttaccgaagactttgaacagaatccgtattggatacaaaaccgcatacagagtaaggatgcacgtatccgcctgctcctttccctttctgccaatttgaaagtcactgattggctgacacttcaggctcgtggcaatctggattactcagccgataaactgcgtcagaaattttatgcctccaccgctacggcactctgtgggatgaacgggcgctatattgaaatggattatcaggaaacgcagatgtacggagatgtgatggcgatggtcaagaagcaactgaatgacttcacattggatgtagccattggtggcagtatcaatgacagaatcactaactctactcgcattgattcgaagaatgcttcgttgaaatatgccaatgtgtttaatcttgccaatatcgtgatgagcagttctgccagtatcgatcagaaaatagatgcccattaccaactgcaatcggtctttgcgacggcacagattggctataaagaaggagtcttccttgacctgaccgcacgtaacgactggtcgtctacgctggcttacacgaagtacgagaagaaaggattcttttatccttccgtcggtgtctctttccttccggataagtgggtaaagatgcccgaatgggtttcgttctcgaagttgcgcggtgcttatagtatcgttggcaatggggtgcctccctttatcacctatcctgtttcgtatgtgactgccggtggagagatactggcaagcgatgcggcccctttcgccgagatgaaaccggaaatgacgcattctgtcgaattgggtatggaatggaagttcttgcagcaccgcctcggattaaatctgacctattaccgtaccgacacgtatgagcagtttttcaaactgcctgcgcttgcgggcgataagtatgcctatcgatacgtcaacgctggagatatccggaatcagggatgggagataacgctggatgccactccggtactgacccccgacttcacgtggaagacctctctcaacttctctgccaataagaacaagattgtagaactccatgaagaactgaaagaatttgtttacggacctaccagcttctcgtccagttatgcgatgaaactggtgaaaggcggctctatcggcgatatttacggtaaagcctttatacgtgatgaagaagggcacatcgtttatggaacggacggagactataaaggacttccgttggtagaaggcgatggaaataccgtaaaggtgggcagtgccaatccggtctttatgttggggtggaatcattccttctcctacaaaggtttcagcctttacttcctgcttgactggcgctatggaggtgaagtcctttcgcagacccaggcggagatggacctctatggagtatcgaaagcgacggcacaagcccgtgataaaggatatgtttcgctggaaggccggcaaatgagtgatgtcaaaggattctataaaaatgtagtgggcggacgcgccggcgtgacggaatactatatgtatgacgctaccaacctccgtctgcgggaagtatcgctgagttatagcttcccccgaaaatgggtacagaaaacgaattgtctgaaagacctgcaactttcttttgtagcccgcaacctttgttttctgtacaagaaagcgcctttcgatcccgatctggtactttctacaggcaatgacaatcagggaattgaagtgttcggtatgcctaccacccgcagtctgggttttactttgacatgtgaattttaagagcaggagggaagatgatgaagaaaaaacatatttatatatacttgctggggatgctgctgctttctattggttgtacaggaaaattccgtgaatttaataccgaccagtcgggaattacggacgatgatttgctgattgacgacaatggcttcggtattcgtctggggattatccagcaaggcatttactttaactatgatttcggtaaaggcaagaactggcctttccagttgatacagaatctgaacgcggatatgttctccggttatatgcacgacggcaaacctttgaacggaggtacgcataactcggattataatatgcaggatggctggaacagcgccatgtggacacatatgtattcgtatatctttccacaaatctaccagtcggagaatgccacccgtgatacggaacctgccttgttcggcattaccaaagtgctgaaagtggaagtcatgcaccgtgtgacagattattacggccctgttatttataagaatttcgcgaatgcccagaatcaatatcgccctgatacgcagaaagaagtctactatgagttctttaatgaactcgattcggctgttgtctctcttaccgattatatagacaagaagcccgactccaatggattcacccgctttgatatcttgctggatggtcaatattcctcctggatcaagtttgccaattcgttgcgtatgcgtctggcaatgcgtatttctgcggttgatccggataaggcacgcgccgagttccggaagggactggaaaatgaatttggtgtctttgaagcggaagctgaacgggtagcagtctctacgaaatccggattcacgaacccgttgggagagctcaaccgggtatggaatgaaacttatatgagcgctgcaatggaatctattctgacaggctacgatgatccccgactgaaagtttactttgaaacctgtaccgacaaagcgtatgcaggagagtatcgcggcatccgtcagggaacctgctttgcgcacaatcattatgcaggcttatccaaattgtccgtcgatcagagtacggatgcccctttgatgagctccgccgaagtctggtttctccgtgccgaagctgctttgcgcggatggattccggaagatgaagaagaatgttatctgaacggaataaaggcgtctcttcatcaacacggcatttatcagatggacgattatctgaacagtgagcggacggctgccgatttcatcgacacacaagactccgaaaataacattcctgcccgttgccgggtttctcctaaatggaatcccgcagacgacaaggaaataaagctggaaaagatcattacgcagaaatggattgccttattcccggaaggttgcgaggcatgggcggaacagcgccgcacgggatatccccgcctgtttccggtacgcttcaaccatagcaagaacggatgtattgacacagagacaatggtacgtcgtctcaactttcccggtacgctgcaaaccgaagacagagagcaatacctggctcttgtggaggctctgggcgggcccgatcatggaggtacccgattgtggtgggatacaggaaataatagtctggattaaaattttagtgtcggaatgtgaatatatgtataggtttaactatttttgcaccttcatttaaacacatttgtcatgaaaaagatcatttctgctcttttcctatgtatgctgctttctgccgtaccggaattgcaggcacaaaacattcagttacattatgatttcggacgttccctgtatgataaagacttgaaaggacgcccgctgttgacctccactgtcgagaagttccatcccgacaactggggaagtacctacttctttatcgatatggactatacgtccgaaggagtcgcttccgcttattgggagatagcccgtgaactgaaattttggaaaggtcctttctccgcccatctcgaatacaatggtggattggcaaaaggattctcctacaacaacgcttacttggcgggagccacctatacctataataacgcttctttttccagaggcttcacattgactgctatgtataagtatatacaaaagcacccatccccgaataacttccagttgacaggaacatggtacatgaacttttgcaaggatttgctcaccttctccggttttgccgactggtggcgtgaagaaaccaagtatggaaaaaccatcttcctctccgaaccgcaattctgggtaaacctgaaccgcatcaagggagtgaataaaaactttaacctgagtgtcggttctgaagtggaactgagcaataacttcggtggtcgtgacggcttctatgtaattccgacactggctttgaagtggacgctgaattaaacttcgaagtacaaaattccccagtggatatacatcaattattgaataaaaatatcgaatgaaaacagatttgatctatggcgtagaagaccgccccccatttaaagatgccctgtttgctgccttgcaacatctgttggctatctttgtagccatcattacacctcctcttatcattgcgagcgcactgaagctggatgttgaaaaaacaagctttctggtatctatgtccctttttgcttcgggggtatctacgtttatacaatgccgtcgtatcggcccgataggagcgaagctgctctgtatccaaggtaccagtttctcctttatcggtcctatcatagcgaccggattagtaggcggacttccgttgatattcggctcctgtatagctgccgcacctattgaaatggtcgtcagccgtaccttcaagtatcttcgcaatatcatcaccccgctagtgtccggcattgtcgtactactgatcggattgagtctgatcaaagtcggtatcgtttcctgtggcggcggatatggcgcgatggacgacggctccttcggttcgtgggaaaatctgtccattgctgcactcgtattgttgagcgtcttgtttttcaatcgctgcaaaaacaaatacctgcgcatgagttccatcgtgttcggcctttgtctgggttatggactggctttcgccctgggaaaagtaaatatgagcgcactaaatgtcgagatgctgatgagtttcaacatcccgcaaccttttaaatacggtattgattttaatatctcttcatttatcgccattggcctggtctatctgatcactgccattgaagccacaggtgatgtgacagccaactccatgatttccggacttccgattgaaggtgattcttatctgaaacgtgtttccggcggtgtgatggcagatggcttcaactctcttttagcaggtatattcaactccttcccgaactccatcttcgcacagaataacggtatcatccaattaacaggagttgccagccgctatgtaggctattatattgccgctatgctcgttctgctgggattattccccattgtaggagctatattctctctgatgcccgatccggtactgggaggcgccaccttattaatgttcggtacagtagcggcagcaggtatccgcatcgtttcctcacaggaaataggccgcaaagaaaccctagtcttagcagtcagcctatctttaggtttgggtgtggaactaatgccggacgtattaaaacaagctccagaggcgattcgaagtattttctcttcaggaatcaccaccggaggtttaactgcaattgttgctaatatggtaattagagtgaagtaataagtaataggtaataagtaataggtattaagccatgcggataaactaaccagtagctacggttattacctattacctaatacctattacttatttctaaattactcattttatctgtaatccgaaaggggaaatctggatactcgtagaggctgaaacgaggttcggtttccccttttgtatagctccagatagaagcgtagtcttccgggtcttcccccatcttgctgagttggcgtagataagctgccagtgatttattctctacgatatagatttgtcccatctgatcgataatagggctatggtgacgggtaccgtcatgttcgaagcgaagaattcgtttgccttcctcagtcaatcctaccaattggaaagtcatactcttgccgatagcaggcagattcagtacactgcggtcggtagcaaggaaaggcagatgatgctttctcatgaaccgtcttatttgtttggcggtgtcagcatcttctttcgttttttcttcatttatacctgcactgactttggtctccagtatcttatacaattcttccgcctgttccggagtcatctgtccgtaaattttctcttcctgctgttcctgcattgagcgactgttgggggcaaacaccgcataattctcattaaatcccttcaccgagaacgtataataacataccactcccagtgaattgagtacctggcgaagccgcgtagtatgtcctctgcgtgaggcagccaccgtatataccaactggttcgtaataatccatccggcagaaagaatcttccgaattgcttctttagcctcgggggtaacctccagcggtgtctgaaaatgagtctgaatgataaactgcttgacgccaacagccgaagccttttccttaaactcccgcaaaatgtcaaccaactcgtcattaatacgcatcggcaaataagccaataaacgagaacccagtctcacccgttgcaattccgcatatttctcaccttccggacgttcaagattcgccctttgtttgcgtaccgccatacgatacaccgcttctaatatattcttcaacgtcttattctgactcatcagcgcatcgcctcccgtaatcagaatatcgcgtaactgcgtatcctgttcaaaataggtcatcaaccgtcgcaacttactgtcccacgactccttcggtcgtaacgtctcaaattcaaaattcagccgttcactctgaaagtcatacatacgctggcaagatgcacaaagccctccacaagcccgtcccatcgtatcaggaataaggatagccacctccggataccgtcggtgaatattatgtccgtccggcaagagccatccggcagcattcggctttcctgcctccacaatatcttccttctcccatgcacgaatattgccatacgtctccactaatcgtggcgaataaagtatataactccgaatcgcttcatcattatacccataccccgtcacattcagcaacgacaaataataaggcgtagcaaagaacggcattccctttttacgtgcccgattcagcaaatacatcgtctccgacgaaagtgaatttcctaaaaagcgattcaactcagccggacttttcacagccatcgacaaatgaaagcggaaatctccccaccatttgcttaccaactgatacttctcctcataactcatcccttcctcaaaatggaaccgtaccgaaggcttcgacttccggttctcaatcttctgaatcaacagatgcagcatccgttccttattctcatcccgcatctcccgcacttcctcatccaatccggtatcccaccggtcattccggctcttgatgcgctgcggagacggcgaaggaacactttccccctgcaaacgtttgaacaactggaacaattctacaaacaaatccgtcggcatctctatattctccaacttctccgtcagaaactgataaagcaaccgtatcgtctgtaccgaaatatcctgtcccgtagacagttcatgaacatcctgtccatcatactggagtaagagtcgaatttgctccctcgcctcctccgcaacctcattaaccaccccgcaactatccagatgtcttagcagaccagccttaaagtcctccaccgtcggacttacagccgccatctttaccaaccccggcatctcctgcgtatagatttgtttcaactgcgaaaaagtaagtacaagcattttcttttgtttcataagcatcctctatattattatattatttattagtaacgacctatccctccgcaaggttcccccggcctcgactgtccggcgtcaagcgcgggtcttatttacggcgttaaaaagggcagactgtttgagcgaagcgagtttctgccctttagccggaaatgagaccggagtagccgggcaggcgcagccttgattttttctttttggtactttttcttttgcatcaaggcaaaagaaaaagtacataaagataataaaaaaagcggaagtatgccactcccgcttttcctgctatgctattctttacgattttctaacatttatgcgaccttattttttcgtttccgtgtcgtcgttctttcttttcggttcctttttggcaaggagcactatattatatacatagtccgtcatccactgttccgaataccccaggcgttccttgtattggcggacagtcgccgcagtcttgtgcacatcatcagccttccacaccgtcttcgtacaaacatcgtgtaccgtcttctgcgtcatcccgtaaagcgccttcttgaatatagacggcatacggaacttccattgcatcagatttcccatcagcatcatcaagtcgttggaaaaaccttgatacataaacagatacgactggatatcattctgcgtacggcaattacgcttcacggagctgtcgatctccttaaagaaactttcattcagtccgtagtcctgcatcagcattttgcgtgaagctgacttttctgccagtcccagcttacctccctgcgtaggaatcttgaacaaacgtttgaagttagccacatccggtaaaaagcggatgttggtaatacctaagttagtagcgatgactgactggaaataaacccgggtcagtgatatgaaatcttctacattgccgacttttgtttcatcggatttctttttgaataaaccaaataagcccatcgttatatttactattttataatttacaatttacaaatcgtgtgtggagattttaatgagccgcaaaggtacgaaaaagtgttggttttcaccaacattccaagtccttttcgatatccggcatggtctctttcctgaaaacaggactttggatgcccgctttcttctgggcacgatagtccgagagcaggcggatggcatactttccgagaaagataatggcgatcaggttgcagacagccatcagagccatcgtgatgtccgccagactccataccaaatcgagtgtggcgacagacccgaaaagtaccatgccgctgaccaatatccggtaggtgtggagcacccatttctttgcggtgatgaaacggatattcgcttcgccgtaataataatttcccaagatactgctgaatgcgaagaagaacagcgctacggcaacaaagatgcttccggaagcaccgatctcattcgtgagcgcctgttgggtcagttgcaccccattggaggaaccgtccaaaggagcaccgctgaaaagaatgataaatgccgtacaggtacaaattaataaagtatcggtaaatactgctagcgtctgtatcaacccctgtttgacaggatgagtgacgttggccgtcgctgctgcattcggagccgaacccataccggcctcattactgaataatccgcgcttgataccctgcatcagcgccatgccgacacctccgcccaatgcctgttcccagccgaaggcatggctaatgatgagagatatcacttccggcagatgcgtgatattaagtaatacgatgaccagtgccagccctacatatcctaatgccataaccgggacgataatgctgcttacacgcgctatccggcggataccaccgaagatgatgacaagagtcagagcggtaagcactcctcccaacaccgtgtgattgaatccgaacgcatgttcggcagcagcacaaatcgtattgctttgtactgaattgaaagcaaaaccgaaagtaatgctgatgagcacagcgaaaagcatccccatccacggctgtttcaatcccttcttcatataataagccgggcctccgacaaaagagtccttcccgcgtatcttatataactgtgccagggtagattcgataaaagcgctcgaagctcccagcagggcgatcacccacatccagaaaacagctcccggtccgccgatggcgatggcggtggccacccctgccaagttacccgtacccacacggctggcaatcgtaatagcgaatgcctgaaaagacgaaacatgtttttcaccctgtttttcttttccggcggactcgctgagtaatacaatcatttcgcgaagcatacggaactgtacgaaccgcgttcggatactgaaccagacggcacagcctagtaacatgataatcaggatgtatgtccagagtatatcatttatttcattgataaagttcatagttaggtttttgaaaagaataaatcgtagtatatcactcgtttttcattcggaaataaaatttatgattttcgaatacgggctctactatatcataccgaacaaatttggcaagcagatgttcggcggcacgtcgggaaataccggtctgccgacaataccggttgagtgaaagcagcgttccctgttccagcaggtcgagcaggagttgttcgcgttccgtatagcggatcagttctccccgcgggctgccactttgttgccatacacgcaggtggataggggtagccagtatattctcatccttgatgcggagataggcgagaggctttccgttttcgtctttcgcatagacaggcttgtgcggattctcttcgatggtggctactaatacctgtttgccttccacgatatatgtttgtaaagtataatctatctccgggatgcaataaagttgtgcggctgcttcaatcatatatttttcctcttcagatcgtacgccggctattcgtccattgtctttcacgccgatcaatagccgtcctccgtcggtattggcaaaagccgacagcgttttggcaatcttgcgtgcgtcggaaatttcgaatttgaagtcctgttgctgatgctctccttcagctatcaaagtatgtatgtaatccgtatcagtaagcgttttcatggctacaaaggtagggaaaaatggtgaaaagccctttttttagcttattttcgcagataaattcaaaaaaaatattgtttttatgcgtttatttcgggaaacagtgtatttttgcgacacattattaacgaaaaaaataaaaggattatgaaagaattggtagaaaaagtagcagctctgtatgctgacttctcaaaagatgctaacgctcagattgaaaacggtaacaaagcagcaggaactcgtgctcgtaaggcttctttggaaatcgaaaaagcaatgaaagaattccgtaaagcatctttggaagcttctaaaaactaagaaatagaagtctactaagatatcaggaaaaaagaagaggatgtgtcgtgagatgcatcctcttcttctatttatatctccttctcttttctgaaacccgaaatatcggacgaatgtgctatttttaagattacattgaataacggtcactctaaaaataacgaactagagaaaaatctgcataaataaatgcaataatatacgaaaaaaaaccattctttgcatgaaactacatgaaatatacaccttttcaaaacaaaaaagtatcttttggttttaaaccaagggggtgtttctttaaaaccaacgcctccttcctcaccgaccaacctgttttccgtcggtaaggaagacctgaaaaagctgtttttgcttaattttcttctaattgatccataaataccgggaaaataaaagtgtcattcggaactgtttttcttcagtaagcgatcagaatgatcagtgaaaaagaattatacttctgatttgaccgataaactctttgaatagtaaaaaagaggaatcctgtatttgtgaatgatggtatttttatgcctttctttaaagtgggatacaattatgcccttctttcactgtttaaatattccttttttaagaaaggtccttttttagtgatcaatagatgtcgctatatgtgaaaagttattcatggtaatttgaataaatgaactcaatctttccctatttgttgtttcgtttttcggtgatactgattttcggagtgtcttattctgaaaattggtcgtgtatatgcgtattaggcaattatagttgctgaaatatgtgtatatttattgtgtaatatttaatactgagtacaatgttaaaagtagtagcatttatgaagcaagtagccgaagagctacggatggggggaaactttggtacggcgcacgtatatcgcagcagcaccaatgccatcattgcttattgtggggaaggggatttttcttttgacgaggtcaccccggagtggttgaaaggtttcgagatacaccttcgtgggaagggatgtagctggaacaccgtttccacttatctaagaacatttcgtgcggtgtacaatcgtgccgtcaacagtaggatggtcgtttatacgccccatctgttccgctctgtttatacgggcacgcgtgcggaccataaaagggcattgtgtgatgaagatatgaagaaggtattcaccagactgccttcatcttccgccatacctcttgccgtgaggcgtgcgcaggacatgttcgtgctgatgttcttgcttcgtggtctgccgtttgtcgatctcgcttatctgcgcaaaagtgatttgagagataatgtgatcacttaccgcaggcggaagacaggccggcccttgtcggtgacgcttactccggaagcgctcgaactattaaagaagtatatgaaccacgaccctcattcgccttatctctttccgctgttgaaaagcggagagggaacaaaggaggcctaccgggaatatcagttggcattgcgcagcttcaaccagcagctcacgctcttgggggaggtattgggactgaacgataaactgagttcatacaccgcccgccatacatgggctacaacagcctattattgcgaaattcatccaggtattatctctgaagctatggggcactcgtccatcaaggtgaccgagacttatctaaaacctttccgtaataagaaaattgatgaggctaataatcagattattgattttgtaaaacattcaatagttggagtagtagcttgaaaatgaatctgttactttctaggtaacggagctaaatagcgttgcaaagatggatatattttggaaaacatgcaaacaaaaaagatattttttctgataaactactaaaaaaagagaaataatacgataaaacaacggatttctttctattagggacctgttaacctctgatcaagatacaaagaatttcctcccctctgccgcatgtctgaagcaggggtaaatatgtttcactgtaaaatagttcggtttttcatatagatagctccacaggagtcaggacaaaggtttacccgttacctagaaagtaacgggtaaaggctgtttggcccgtatgcttcatagtgtattatataagggaaataaaggttgaatgaattaagaaaaggaggtcgcacgagaaatgaacggaacaacacatgggatttaaaatcaaaagtgagaaattatatttttattatttttttaattta

SEQ ID NO: 4644 - DNA, 9540 bp, Unknown
  gut microbiota DNA sequence
tgtcctgtttggagcgctgatagcgtcctcggcaggtacatttacttcttgtaaagactacgatgacgacatcaagagtctgcaagaacaaattgacaaaagcggaagcaccgttggcgatcttcagactcagctgacaacgctgaagagtgctgcagaagctgcacaggctgctgctgatgctgcaaagacagctgctgcagaagctaagactgccgcagaagctgcaaaaactgccggcgaccaggctgctgccgatgctgctacagcgaaagcgctggcagaagaagcgaaagctgccgctgcgcaagcaaaagcagatgcgatagcggaagccgcaacacaggttgaagcattgagaaattcaatgcaggctgctattgacaacaaactggatgtgacagtacacgaagctgctgtaaaagcactcggtgctcagattgaaggtatcgaaacaggtttgagcaatcttgccaacggagcagtgaaagaaaataccgaagcgatcaaaaatgctcaggatgctatcgaaacgttgattacagcagataaagacttgcagactcagctcgacgctttgaaactttatgcagaaggtgtaaaagatatagctgacgctaacaaggaagatatcgcggcagcgcagaaagctatcgaagctgcacaggatgagattaagaaactttgggatgaaatcaacggtgaaggcggtctgaaagctttgatcggtgagaataaatctgccattgaagcgctgaagaactctacagctcaggatattgctgacctcgaagataagatcaacgatgagctggatgctatcaaatcggatatctcagatattcagggggacatcagaaccatcaacagccagattattactatcaacgctgacttggtgagcctgcacactttgatgacttgccgtctgacaagcatcacgtttgctcccgactatatcgtagacggtgtggaagcgatcaagttcaactcattgaaatatgctccgatgggaagcggtgaaaatgctgctattcctacgaattatagtatttctacagctgctttggcaactgcaagctaccacttcaacccggctagcttcaagttgggcaatgctgactatagctacttggatcgtagcgctacagtgatcaacactcgcgcggctgccagccagtgggttcagatcagcggtactccggttgctaacgctgcaacaggaacagtggacttcaaactgcttcgtcttaacgtccattctactcagccggcagaagataaagtaaacatggttgctttgcaggctactctgaagggtgatgctgtagacaaagacgagactaacgtagtggttacttctccgtatgtatctatctatgatgacgtactggctgcaccggacgttcgcatctctgacaaagctactttagtttcagatgctgacggtgctcattatgcaactactttcactgcttgtaagtcagaagctgttcgctatacaactccttacgatcaagtattcaacctgaaagacctggtggctacttgcttcggtaacggtaatcacaaagaattcccgatcgaagactataagttgtcatataagttctctgtagcttcttctgattacaacatcactgaaggtgaaacttcaaccaaccagcagaaatgggtggtatgtaacgacgctgcggcaggtttgtaccaggcagaaggcttcaataaagaagcgatcggtcgtactcctatcctgaaagtggaattggtagacgaagcaggcaatgtagtacgtcgcggattcgtgaagatcgaatttggtgtgacgaagcaagatgacctcgtagtaggtgacaaggcttatgacttggtagctaaatgtactgaaacagctgctgaatacactatcacagagcaattcatccgtgaaaatgtttaccgcgttattactaacggtaaggaaacaagcatgagccacgaagaattctggaacttgtatgatgcttccggtgctgttgctgtagtgaagaagaacaacctgtcacacactatgactctgccgagaatcgttgacggtgatacttcagtaggtactgctacgaagaagatcgtatggtcatttaatcatggtgaactgggtaagatcggtgccggtggttctcaatttgttgcaactgtaacagtgaagaacaagctgacttcttctgaatatcctgcaagcatcacattcaagttcactgtaaacgtgaagttgcctgaacttactttggatgctactgaaaatgatatttactggacgaaagatggtgatgagtacaagtacttcaatgtaaatgtgagtgtacctaactcagttgcttctcctgcaagtgattgtcagttcagaagagcattgacagaagcttactctgcttacactgtgaaaggacttccgggttgcgaatctgctcgttacaaagtaatcaagacttactctaacggtaacttgacttctcctgtaatgtctggtgttcagatcgacggtaactatatcaccctggataagagcaatgctgctgtgaaggctgcgttgaacagcgcaaacggtctgcaagctgtcgttgcacacatctacacgatgagcaatggcgacaaagtgactgttaacgaatttatggttgactttatccgtcctgttaacttgaacatgccgagcggtattgcagtaatagacgctaagactggcggtgatgttgctgacttccaatggaatggtctgttgactgactggagaaacgaagcaattgtaaaagatagctggtcatgggttgaaaatgttcattcttactggaagagagtttgtactcctgaattcgaatatgttcaaggtcacgaagaaatggttacaccggctcagttggatgtagaatatggtacgattaagtttactaccactactgtgactactatgtatacaggtaaggctacttatagatactataacagattgggtggatctactaagaagacttacacaactgaagagttcttgactcaggcagaagttgacgcttctcttgaagcacagaaattagctggatggccgttgatatatccacatgttgaattagatggcgatattatatatacggaagtttctaaacctgcaagcactactattgagtacgactatgtgaagagtatcaactacgtaccggcagtttacaagtgggttgaaggtaactggacaatggttcctcacaaacacactgaaaagcctgcattcgaaggaacatcttacggacagatctcaggatgttgggaatggacgaagaaagagtggggcagaccggattggaatcctggacaatactggttcttctatggtccgttcggcgatgtaacactggatttgaacaaagtagctacaagcttggaatacaacggtaacaagttgcctgatggcgctactttggttcagactggtaacactgtgaagtatgtgaatgttagctcaccggttggatatacttatcagatattcattcctgctacagtaaattacggctggggaactacttcttctacattgactattacagttaatccgaataactaagaatcgcaaatgtcaatgaattcttagacattcaacaacaaaagggtgctctaatcagaaaagggcacccttttcaccataacaagtacattctgcatactctgtgataagacataaaatatataaaattatgagaataagaaatttattaatagccatacttactgtcggcagcacagtagcattcgctcaggaacagcgacaaatcaaggaagaaggcaagactgtgttcaaacctcattggtttatgcaagtacaggcaggagctgctcacacagtaggcgaagccgattttaccgatctgatctctccggcagcagctgtcaatgtagggtataagtttgcacccgcatttggagcccgtttaggcgtaagcggttggcaggcaaaggcaggatgggtcactccttctcaaacctatcagtacaaatatctgcaaggcaatctggaccttatggcagacctcagtactttattttgtggttttaatccgaaacgtgtattcaatggatatatttttggcggcgtaggattgaatcatgctttcgacaacgacgaagcaaacgcactggacacaagatctcacgaactggagtatctgtggcaagacaaacaaaaccttgtagccggacgtatgggactgggatgtgatctgcgcctcaatgaccggctggctatcaatattgaaggaaacgcaaatgtactgtccgacaaattcaactcgaaaaaggcaggcaactgtgactggcaatttaacgtattagtgggcctgaacatcaaattaggaaaaagctataagaaaacagctccggtatattatgaaccggaaccaatagtagaacaacctaaaccacaacctgtcgtgaaacagcccgaaccggaacctgtggcagtggtagtggaacctatgaaacagaatatattctttgctctgaactccgcacttctccagaaagaccagcaatcgaagatcgatgcaatggtggcatacatggaaaagtatccggcaagcaaagttgccataaccggatatgccgacaaagaaaccggtaatccgagaatcaatatgactttatcagaaaaacgtgcgaagattgttgccgatgccttgaaagacaaaggaatagcgccggacagaatcgttacggattttaaaggagatacagtacagcctttccgggtgcctgaagaaaaccgggtaagtgtctgtattgcagaataatattttcccacttctcatgcgggtatataccccattcctctattctattaataaaagtatgagggacctgcatgggaggtaaaagaggaagcccgtgcttgtgaaagcccggacttctgcaatgaaccctttcttcacttgttagtgaagataaccccacagggaacagatggaaagcaatgcttgtgaaagtcttctttcccgatatctgttccttacagaggatgcccctcacatttttcccacgggcatcctctttttttatatatatagactgattttattataaagtctgattgttttgtttatagagaacaaaatacgagtgatttggttcgttatcaaccggcattccgattaaaatcgtatatttgcgtctgtaatcagattgggtccatgaacgaaaatgtcctcactaaactaaagatacttgcagaatcggccaagtacgatgtatcctgtgcatccagcggtacagtgcgctccaacaaaccgggcatgctgggcaataccgtaggtggctggggaatctgccacagctttgccgaagacggacggtgcatctccttgctcaaagttatgctgaccaattattgtatttacgactgtgcctactgtatcaaccggcgcagtaatgatctgcctcgcgccacgttatccgtctccgaactagtagagctgacgattgaattctaccggcgcaattatatcgaaggcttgtttcttagttccggtgtggtccgtagtccggattatacgatggagcggcttgtgcgtgtggcgaaagatttgcgtcaggtgcatcgctttaacggatatattcatctgaaaagcatccccggagcaagccgggaactggtgaatgaagccggactgtatgccgaccgccttagtgtcaacgtagaaatcccgaaagaagagaacctcaaactgctggctcccgaaaaagatcataagagcgttttcgctccgatgaagtatatccagcaaggtgtgctggaaagtaaggaagaacggcagaagttccgtcatgctccccgttttgcgcctgcgggacagagcacgcagatgattgtaggggctacctccgagtcggataaagatatcctttacctttcgtcggcactctatgggcgaccgacgatgaagcgtgtttattattccggatacgtctccgtgaatacgtacgatacacgtctgcctgcactgaaacaaccgcctttggtacgtgagaaccgtctttatcaggcggactggctgctacgtttctatcagtttaaagtggatgaaatcgtagatgacgcatatcctgatctagatctggagatagacccgaagctctcatgggctttgcgtcatccggaacagtttcctgtcgatatcaataaggcggattatgagatgttgcttcgtgtgccgggcatcggggtgaagtcggctaagttgattgtggcatcccgtcgtttttcccgtctgggtttttatgaattgaagaagataggcgtagtgatgaaaaaagcgcagtacttcattacatgcagagaattgcctttgcagatgcagacggtgaatgagctttctccgcagcgggtacgcagtctgctgcttccgaagcctaagaagaaggtggacgatcgccagttgatactggattttggggaataaatggagtttcagatgttgtaaaccgcaagataatgaacgtctatatctacgataaaacttttgatggtctgctgactgctgtcttcgacgcttattttcgtaagacctttcccgatttcctgttgtcggaaggggatgctttgcctttgttttatgatgaattgcatacggtggtcaccgatgaagagaaagccgcccgtgtgtggcgtggcttgcagaagaaagtctcttcttccgcgcttggctgcctcacccagtgttggttgtcggaattgcccgatatagggatggttatctttcgatatattcgtaaggcgatcgacgctccccgttctatcgagactaacttcggcgatccggatgtgcttctgcttgcccagatatggaagaaggtggatggtgaacggatgcatctgatgcagttcgtgcgttttcagaaagcggcggatggtactttctttgctgccttcgaaccgcagtataatgctttgccgcttactgtccaacatttcaaagatcgttttgccgatcagaagtggattatctatgatatgaagcggcgttatggcttttactatgatttgcaggaagtgactacgatctcttttgatgacgacagccgggaagctcatctgattacgggtatgctggacgagagcttgatggatgaaaatgagaagatctttcagaagctctggaaaacgtatttcaaggctatctgcattaaagaacgcatgaatccgaggaagcatagaaaggatatgcctgtccgctactggaagtatctgacggagaagcagaaataggcttattctatccgctgcaccgtcacatccggaaatttctgcatcaacgaaagtaaatgtccctcatcattgttccgtttcgatttgatgaccattgtgacttgataagattccatttcacccgaatgctgtgtttccatttcgtaagagacaatcatataatcttttgaattaaatttgtccgctatctgtttcaaagtatctttgttgttagtagagaaggagatcatcgaacttttcatgcctacactcttgaagatgtagctgagcagttccagtccgatcagagtcagtacagtagtggctatgccgatggtgtacattcccgcgccgactgccagaccgatgccggctgtagcccatataccggcggctgtggttagtccgcggacgatttgtttctgtaggataatggttcctgcaccgatgaatccgatgccgctgactacttgtgccgctacacggctggggtcgagcgtcacactgttttctttgatgatctcttgaaatccgtattgcgaaacgatcatgatcagggcacttcccaatgatacgaggaagtgagtgcggtatccggcttctttggcacgatattcacggtccagtccgatgatggctcccagtattcctgccaccagtaatcttaacataaaatcaacgttcaacatcataggttcggtctcctttcttttctttgtttgtttcttctgtttttttctttaaaaacggttagttctataaatatacaattcttttctctttttgtgctattaatttagtaatatttgaatgtagcatctgcattttatcgtatattcgcagacaaaaccatgcattgcgccaaagattgaataagaaatgaagaaaaggatattttacatcattagttttttggtaatattttgtatagaggtattcatagcgttgtatatacgtgatagtttcatacgtccttatatgggagatgctttggtcgtggtgctggtatatagtttcgtacgtatatttatcccgacaggggttccccgtctgccgttttacgttttcctgttcgcttgttttgtcgaagtactgcaatattttcagttagtggaaactttgggaattaccaatcgggcattaagaatcattctgggttccacgttcgattggaaagatattgcctgttatggagcaggatgtatctttatctttctgtttgagcaaatattcagacgacgttaattggaataactgattctcttgtttggcgattgcttattgtacgctctctttattttcgttttctgaagtcggattcagatcgtgtccgcaatacttgcagaactgcgcattgtcttcatgccctgaccgatggcagttcggacattctttgtctcttctccgtttatattccttcatcatggaggcggacacaatgccggtaggtaccgcaatgatggtataaccgattagcatgacgcaagccgaaagaaactttcccagtccggtgacaggagttatatctccgtatcctacggtggtcattgtgacaatagcccagtagatactgttcggaatgttattgaattgagaattgggcaaagttccttcgatcatgtacattaatgttccgatggaagtaaccagaatcacaacaaacagaaagaagaccgcaatctttttactactttcccgaagtgcggtgagcagtcgttcgccttcattcaaaaaattgaatagcttaaagacacggaacacccgtatcaatcgaaatgcacggatgataagcaggtagcgtgctcccggaaagatcaaaccgatgtaaagcggcaaggtagccaacaagtcaacaatgccgaagaaactgaatatgtatttcttcgggcggggagagcaatatattcgtgtcagatattcaaaagtaaagaaagcagtgaaaaggtattccattacgacaaatggcgtagtcagataggaggggagccctttcaggctttctataatgactaataatacactggcaaggatacagccgataagaatcacatcaaacaactttcccgaaggagtgtctgactcgaagatgatgacgtacagcttatgtttcagcttttggtcattcagaaaatgatggattctttcttttagtttcatgagaataatcagttaacaggccaatatcccaataacctgtattttacctattacttattacctattacttattacctgctacttattacctgctacttattacctattatatt

SEQ ID NO: 4645 - DNA, 169 bp, Unknown
  gut microbiota DNA sequence
gtttttcttctttaccttctttccctttcgctaagagagtctgagaaacgatagaaaaagaaaagcgaaaaaaaaacttccgaaaacatttggtggttaaaataaaacctcttacctttgcacccgcttttaaaacgaaagcagcaagttctttgaaatattgataaac

SEQ ID NO: 4646 - DNA, 10536 bp, Unknown
  gut microbiota DNA sequence
catcacaaacagtcaaacgttccactctcgatagccaggagtttcccgaatctctttcaaccggagtaccgttgcagttgctgcaacgccgtcctgatattcgtcagaaggaagcagaactggctgccgcgttttatgcaaccaatcaggcgcgttccgctttctatccatccattacgttgagtggctctgcaggatggacgaactctgcaggtggtgttattgttaatcccggtcagtggttgctttcagctgtaggttcgctggttcaaccgcttttcaatcgtggacagaatatcgctaatttgaaaataacgaaagcccgacaggaagaagctctgcttaccttccgccagagtctgcttgatgccggagcggaggtgaatgatgctttggtgcagtggcagacggcgcgggggcgtcttagactttccaagcaacaagttgcctcccttcagtctgctgtccgtagttccgaactgttgatgcggcatagctcgcaaaactatctcgaagtgcttactgcgcggcagactcttttgcaggcagaattgtctgttgcttccaatcgttttgacgagatacaaggagtcattaacctttaccatgcattgggaggaggtgcttctttataggtctaatgctaaaaaatgtgataatttagtagacgtggagcaaaaaaagaggaagaatgtaatttttaatacccaaaaatactatatttgtatagccgttgaaaggtgcgttcattgagactaaatatcgaaaagcgttcagcttttttacgtagtaacgaaactaccaatttcttttaccctttgggtgaatattacaacacgtaaaaatgactgaacgcctacgcttgttatacatatactttgcgtgggcgttcttctcatttgtgttgtagggattggtagttcctgttgctacatttgggaagaaaaggctcacgtttttttatatctattcttgacataacattcaaaacatatgaaaagatcttcattttgggttttatcgtaaaagtgcgttgcttttttaacgagttagttttcctttttattaattaaaaaaaagactactatggataagaaaatcgtaggtgccaacgcaggcaaagtatggcacgcccttaatgaggctgatggaatttcgattcccgaacttgcccggaaagtaaacctgagtgtggaaagtacggctctggcagtcggttggctggctcgtgaaaataaggtagtgattgaacgaaagaatggattaattgaaatttataatgaaggtcattttgacttttctttcggataagtataatgaatataatgctggttaggttatataatgaaagaagctctcgataaaaaactgaattcagtgatattgaaagcttctttttattatataccttgtgtaaaaatgtcttgttgaagagtaactgtaatggagtgttcacccttccctgttatgataattaccttatttctttgtcagaaacttcttgctcaaccactttcttacaggctcgtcatacagtttcaggcaaaggtaagccaacacaatgcttccgaagaagacacataaggctaccggccatgactgggagaaagtgatatgtggctctttgctccatagccaggcatagaacagatacatgaaaggataatgtatgatatataccggataagatatatctcccaggaatttacagatcttggctgtacctttgtccgtcgtttttcccgaagcacccagatagacaagtagcgggaaaataagaatggtgcatatagcatcgtaaataccgttcatccactgcgaagtatgaccgccaacgtacggcatggaaagtaaaacgagagttgctacgctgcatatccagaaagcacctttgatatggacaggtttaaagatgcgtgacatcaataatccgatagagaatgcgaacagcatacgtagaaaacctccgatcaggttatagtcgatcatcgaccagcctactcctaaatgatagttgccggaaagattgaatatcgagaaggaagccaatccgattcctgctatcacaacgagtatcgtaagtgctttggtagacagtcggcgaataaatagggcatacaaaatattaccgatatactcgaagaacaaagaccagctgggaccattcaaagggtacatctcgccgtttccacggacctcgggacccgtgcccggaacagccggaatcaggaaaagattgagaagcatagccaccattaccattgatatggaaacacgggtaccgtcccattgctcgcagccttgtatgcaaaatgtgatagcccccaaaacggctcccataacaaccatcggatgcagacggattaacctgcgtttgaaaaactctttttggatcatcgttgttttccagcggtcatcataagcatagccgataacgaatcccgacagaataaagaagaaatcgacagccagatacccatgattgaatttttggtctatgggacttgtagcaaaaccttcgaatacatgataccatatcactaaaagagccgcaacccctcgcagtccgtcaaggagtacgtaatggggtttagagtctgcaaatgcagaggaagagattttttgcatgttttaagttattgttcaaattagtattagtcattgaagaagccgcaaaaatacggaatttataagtttaaaaatttgtcctgcatcaaaatcttgccgtgtatgggaattatttgtatgctctgaggcggctgagtgttgatagtgtgatgcccagataagaggcgatatatcccaattgtatccgctggcacatttgaggaaactgaagtttgaatgcttcatatctttcttttgcagacagggtgaggcggtctttgtgcgaacggtgcaggcgtctgtattcgttttgatgaatcactcttccccagtttgccagttcgatattggtctgaaacagccggagcagatcggttagtgatattctgtatgcgacgacgtcctcaagcgtttccacaaactcttcactcatcttattataatacaattcatccatgctgaagacaatcgctccttcgcacgcaaaggaagtcgttatttcctctccgtttaccagccagaaagagcgggtcattccttcttcaataaaataagccgatttgcaaaatttgtcagcctctatcagttgatgtctctttggaaaatgacataatactgtattttcttttagtatttgtatcgtttcatccgaaatgggatacaaagagttcatcttatctataatgtttctcataaagtagccttaataattttctgtcaagtgcaaaaataggaaaaacaattctgcctacaatagatgctggtgaaaaagggggtgttttatcggttcgctcactaaggaggagagaaaccggagagtgggaactgctgctgaaagacaaagaaggtacatttcattctttggtgaaatgtaccttctttgatatcgggaagaggctaaacacatgagtatagccagcttattccggaaacggtatacatcaattgacgttgcttaccttggattctgctgtatattcggattggcatctatctcgctttgtggaataggcagagctattctcaggtcggtagcttctatcttttgtgcgttagacgctttcaaagtctcaagatgccagctgcccttgcgttcaatagccagaccattgcgtaagtagtcatagaagacttccccttctccaaccagttccttgcggcgctctttaagaatcctgtccagagtaaaagtctccgttgatacttgctgactggtatccgtggtacggcggctgatgatgtcattcagataaccttgtgcttcttcaagatccgttccttttttcagtcctgcttcagccgcgttcagatagacttcggaaaggcggatgatgcaaatgttattagttttgggatcatctccggtcttgccggggaacttggcaagatagactttctcgtgcatggcggcagccggaagtccggtgttgttttcgatgacagattcctttgtcaggcagtggcgtacatccttggggtcttcattcagcaggttcaggaaatcttccgacaagatcagattattccagtcgaccgttgcttcgttggcataaaccatcggagcaccctcaccgcccgtacctcctgaaggttcggataaagtgatgtaaagttcgaataatgattctgactggaaatcctgcccccatacattgggatattcctcatagctgtaaagctgataacgtccgccgttgtttttgatgacgtccgtagcggcatcataagccttctgatattcacccatattcagatagactcttgacagtaatgcctgagctgcccagtagtttatatagccattggatgtctcttgtctcaatccggacagtgcattgctcatgtcgctgactacctgttcgtagcattgtgctacagtgctgcgtgacggtttatgtgtgggatcggaaggggaggtctcgatgggtactcccaatgaagcccccttgtcattcgtataaggcattccgaacaaccgggtcaggttgaagagggaaagtccccgcatcaccagtgcttcggacttgatgcggttcaattctttagtatcactgctttgaatactgcccgactctattttctgtatcagattatttgtctgtcgtattactttataaacagtattccacggcagtacaatattcagattatcggaagcgagcacattgtattcgtaatagggagatacacgttttccgtctcctttggtgatacgtgcctgtacatcggtggcacggcaatcgccgtaataccaatagttgtctccgtagtagctatggccggatgccagacgataaattccgttcagagcgatctgggcatcgtccagtgttacgatggcctgtccggtttctaccgagctggtggtgttaaggtctagccagtctgccgagcaggagctgttcagtagagccattgctgtaagtatgtatatatgaattcgtttcattatgttgtttatttagttagaatgatagggatgttagaatgataattgagctccgaaactgaaagtacgcatggcgggagcctcacaaaagacttcaccgttaacgggtgtttcggggtcatactgtttccatttggcccaggtcagcagattatttcccgagaaatatacccgtactttgtcaatcatcagcttttgagtccactggttgggcagtgtgaagccgagggtaaagtttttcaggcgtaaatgatcggtactgtggatatagcgggacgagttggtggaagtagccggttcaccatatacgaaacgtggggtatccgtctgatctccgggcttttgccaacggttcatcatgtatgcgggcaagttgtatcgtgaactgtagatggaactgctgccgttttcaatataagttcccagtttgtcgaatgagtaaccgcccagtgaataagttagtgtaaaggtcaggtctatccatttgtaattcaggatattggtgaatcctcctgatactttgggagtagcggttttgtacggaatagattctgctttggcagcgtcggtggtgagttcccgattgtagcttccgtcttcattttttgtattcagataatattgggcagaaccggtcagcgggtctactccggcaaactcttttacataaaacgtatgataggggagtcccactttatggatgaaccatgttccctcaatcgtctggtctaatagtccgttgagtgaaacgatcttattccggttatggctcaggttgaaaacactggtccagttaaagtcgttggaaacaacattcagcgtacgcaattcaaactctactcccttgttgttcaggcgtccgatgttgcttaaataactggtaaatccggtagtggcgctgatggggagactgtaaagcaagtctttggtatcccggttgtaatattccagactcgcaaaaatacgattgataaatgaaagatcgatgcccagattcaggctgtaattcttttcccatgtcaacagatcattgggttgtgccgattcatacgatccggctgcctccatgtagttttctccataactgtacaatcctttgtagccgtagtatgaaccgggctgatttccgtttacaccatacgaggcacgtattttgacatcactcagaactggctttacggctttcatgaaattctcgttgcctaaatgccacatacctgacacagaccagaaatttccccagcggttgttgggtgaaaggcgtgaacttccgtcgcgacggtaacttccggcgatgtagtaacggtcgtcatagtcataattcagtcgtgatagataagaaatcatccgataggcttgggtggcagacttaaaactgttcaatacggcggcattatccggttctgtcagtttatcactggggagtttggacttttcacccgaagcgtggtctgtctggtagctttctatttcataagccgccaatacatcgagatgatgtttgcgggcgaaagtacgcacatagttcagtgaggtcgatgagatcagtttgccgtattcaatgaagcctttggctgtctgggcgtcgcttccgcttttaggacctgccgagctcagagggttatagtagcgtgaatccttctggatagtataatcatagcttaatgtctcttttagtttgagacctttgatcggctctatcgctgcgtaaccggttgaaaacatacgtgtcatgcgcacacggttgtaatcggtgagtatgtcgcgcaacgggttcaagctggtgccgtcataagctcctacgtagtttccttcttcatcacgcaccaccatggaaggggtcatggtcatggctacgcacaagaaagggttgatggatgatccgcgttcctcattcatttcctgattcatttgcgagaacatcatatttgctcctacttccccgtatttgccgactttctgcgtcatgttcaagcgcgcagagtaacggtccaggctggagtttttggccaatccttcttgattgttgtagccgagcgaagcatagaatgtagaacggtcgttaccgccggagacggaagcttcataactctgatgcatagcggtgcggagcagctcttttcgccagtccgtgtatcccatggccggcttatatgcatatgtgccgatattggaattggcatattcattcggagactccataccgttgtctattgcgtaattcagcaatccttcatagagcagttctttccgttggtcaccgttgagggtagggcggaagtcgacggccgcatgagagaagccgcctgatacgttcaagtccacgcgtacctttccggtatttccttttttagtcgtgattaatatgacgccattggcggcgcgggaaccatacagggaagccgctgccgcatctttgattacagtcacgttttcaatatccgacggattcagtgtactcattatattggtcttggagttgttcatatatgctgcatcaggaccaccggaactcatactcccggaagtaaccggtactccatcaatgacaaacaaaggttcctgtgaagcgttgaacgatcccattcctctgatgcgaatactttggttggcacccggttgaccggaactgctggttatttgtacaccggtagtcataccttgcaacttttgctcaacgctcatcacgggtacttctttcagcatgtctgtacgcagcgtattggccgatcctgtgaacgaggatttggagaaattaccatatcctgttactactacttcgtcaatatccatcgtttcggggatcagtactattttgagttctttctctctgcgggggacgcgtatttcctgtgtcttcattcccacataagatacgaccagcatcttggttccggtttccacggacaactgaaactgaccgttgatatcggtaatcactcctttggtgggattcccctttacactgacggtggcaccgataagtggttcattatcctctgatgatataacaacaccggatatgttcagttgctgagcggatgcatatgaaatactcaacaaacaaaacagtaagctaaaacataatgttaacctttgattaatcttcatacttttatatttaaaaatacatttgctataaagtcgatacaaaggatataccaataggatataaagaaatgctgaaaagataagatacagattaacagcggggttgaaaaaaatgatattattggggaggtgtggaaaaatgtggaaaggtgtggaaaatatccccaatcattggtacgataaatagcatggctatatggattatcgtaccgataatgattggggatatagatattcactgtgtaggcagcattcgctcctatgttcagataaacgtcagtttctgcggtaattcagataaacttctgctataggcatgataaacgtagtgttcaaacaagttaatctaatcggcagatggatttacagaattacttaaagttcacactttggcatccgctgccctccgatgtaaagtcccttcacttttaggttcatgattcctgaaaatgttgaagatggatgtgctatcggttttacaaaatagatgtttttcatcacaaaattttgtatcatctggttgttgtctaccatagtttggataagagcccatttatttcccggtttccagaacgaacaatttttaatttcgatcttttcatataaaggccaagaagtggaactattgtagttcacgaatcggatgtctccactaccatttctgccgactattgcatgataattatcaaaatagaagccttttagtagtctgccgcacgtgtcggtttcaggattgttgctcttggtattgattcctgcgcgtatacagtgggctaagcgtgtccatccgatggcattgctaatacggatgttctcggtatcggagttgctccagttgaggcgatctttgttgtagacacctgcagccgcgaaagtatttcgtatttctgccggatttgcgtccgtattggttaaattgatggatttgttttcagtgtaggtgcgtctcggaaattcattcgagggattataatgaccagttgcaaacgcatcgtcatttcctaaagtaatggagccattgactgtgatgttcttgccacttgaaagattgagtccgtcaatccatccatgattgtagggagaaaggccttttatgttgttcagattaatgtccacgacatcatgtgtttcccaattccattgctgagaatctcgcatatatgtatcattaaatgtgatgttgtttgatttctttatcactacaccaccttgatgtggggtgttttttgcgtcttttctgtcggttgagaaagagaggcagccttgcccatcatgtatgccacgaccggaaattgttatatagctggagtaggcaatgtatattgcaggctcgatagcttctctacattctttctgacggtttatcatgagtgcattttcgtcggtataaacgaaaagaggttttccaccattgttggcgtctccgttccagttgtgtattttaagtcccgaccagagatagacaccggcggggatgtataatgtattgagttcgggtgtatttttgattttttccaaagccgcttgtagtgcatcagagaggtcgttgttgtctcttgctcttaagttggggaaggctactcttttgcttgtatatgagacgaaccgacctgcttcgtgattccaggtgaataatcttccatcattaagactagcgtctgtaacgctccccgcagggcggcagatctgtccgactgagtccgtatttggattttttcgcagatagttttcagaaaacgtcttgaaattaagtacattgggggcagaaagcgagggttgctttgctggttcctccagagggtcgtttataagcgtaagttgcgggttagttgtggaggcatcttgcggatcatccccgttgataatcactatggcatatggcaagtctttcaccatttcgaatgtgagtgtttttctgtcagcactgatcacaagcgccttttgtggataaaagcgcactgggtggatagtaacactgttgatctcggtccctcctatgatattgatctcaattttaggtgtcaagctgtttgaggcaaagcgggcaacatccatattatgcccttgatttccgttaacagtattgtcgtaacggatggcaggtacactaacatttgcgactttcacaccaaatcgtgtggatataacgtcatttcttacatgtgaagggtaggctactccgctcggtcctgtggctgggatggtaaatggtgtgtatgcatgtacgatattgttttgtgcatacaaaggtacttctgtcaataagaataacattactgtcagaatgttgcaaaataaaaaatttctattcataaaattatttatataataactattatttatttcaaattataggtttacaaagaacg

SEQ ID NO: 4647 - DNA, 4872 bp, Unknown
  gut microbiota DNA sequence
agttgaaaaaacgatattattggggcggtgtggaaaaaatgtggaaaggtgtggaaaatatacccaatcaattggtacgataaatagcgtggctatatggattatcgtaccgataatgattgggtatataggtcttacaatttaatatcccggattctgatactcactgccgttgataatggtagcggtaaaggttgtagaaatgggacgtaaagcataattcggatcaaagaaccgtgcgagatccgggtgagtatctttcagataatcggaactcttgaacatccctgtccgtttcaaatcgtagaaacggcaatattcaccgcatagttcgcgtcctctttcgtctaatacgtcacgaaccgtcatgctgcccgttaacgggtttgctccggcacgttcgcgaaccttattcaggtatttggcggcattcgctcctccgttcagataaatgtcagcctctgcggcaatcagatagacttccgccatacgcatgataaacgtagcgtttaagtttccgtttctttgtttggaggcgtttgcaacgtaatagttactgctgttgtgcttgtttagtgacggataatagtaacggaacagattctcgctggtaccgtcgttcttgtaattccctgttacatttgtatacgagtagttcatgttcacattgttgtttctatcactgtagacatggttgtaatcaatcaacaaatagtcggtcttgtgctcattctgtttttccgtagaataatccgcatcctgcggcatgataaatttaatggccggatcacctttcttcagagttttgccgataactgtttcgtctttgtcgtacatgtgtacggcactttcgtcccaagtataacttttattggccttccattcggtagtgaatgactggtggaatctgggatctaacgtgccgtcattctgtacatacagattcagcaagtgttgcgtaggcatgaagatgccgctgatggagccttcccatgtcagtcgtgtctcctgattgtcttcacgggcaccgaacttattgatgtcacacaggaaatactcgtcattgcggtttagcttgtagttaccgttgctcgaaccgtgtccgtccgtgcctgcataccagcgatgtttccagagcgcttccttgttttccctgttattgctttcttcgaatacttcactgtacgtaggatacatataagtgttgtatttcccgccacccgattcgcagtcggagatcagctgtaaagctgcgtcgagagcttcctgcaggtattccgtgcttccatactcgtaggtctgcagacaggcttttgccagaaagccgagagcggccttcttggtcggagtggtagtcgtggcatgattcccgattgacagccattcggatgcgaatcttaggtcgggcaggatgacttctttgtagatagtcatcgggtcggtgcggacaggagagtagttgaggctggtttccggttccgtaagcatggttacccctccgaattgttccactgcgttgaagtaatagacagctctcatgaagcgggcttcggcaactttcgcattccgttcctcttctgtggcgtagggaggcttgtcgcctaaggcgatggcttcgttgcaggaacctattccgtcgtatgtcccgttccaccagttattggtgtaggtcgtgttgggcgatgtgccggcgaaaaaccagaaccattcggtgtagcttgtcgattggttagccttgtacgtccagaggtccgtatccccttcggtcagcgacatccagtctgcggcaccgtagtaaaacctttccattgcgaagtagcactggttgatcagtgtttcgtatccctcggttgaggtagccaatgtttcattggtaaatgcgcccgggttgtactcttccagcgagcaggaatgtaggaatagtgcggacagcaggacagagcaaaaaactgtttttaaatgtatacttttcattgtcattttcttctttaattagaatgtgagattaactccaaatacaaattgccgataggtgggaaacgcgtccgaaccgttcgtttcggggtctgtgtccttcagttgcttgtctttcacaaagatgaacggattgtaggccgtagcgtagatgcggcatttctccatcaataccttgcgggaaatgttggcggggagggtatatcccagagtgatattcttgatcttgatgaaggagccgtcgtgtactctcagcgaaggatataccgttttctgttcgtctcccgttccgggacgcgggaagtatgcgccctgattgtcctctgtccagtaatccacgcctgccagctgattcttggtcacactttgctctgcggtatagtagccgagtaggtcactgttgattgtctgcccgtagcgtgccattgcaaagacggataaatcgaagttcttgtaggtgaaggagttgttcagtccgatgatccagtccggattcgtgtgtcccagaatttgtctgtcatcggtgctgtatttatgtactccgccgtctccgtttttatccactgtctctatcttgataaatcccggatttacgccatatgcatccagcgtctccttcggagtgtcacttccccagatacctgcatatttatagccgtaaatggcgtgaatcggttcgccggtaaacaggttctcggagatcaggtcaccgtcgggcagcttgtctatcttctccttgctccaggtggcggacagggtcgtgttccatgtaaagtccttgtgctgtatattgtgggagttcaatatcacttccacgccctgattgctagtttgggcgatattctgccagatagacagaggagaaccccatccggtcagtccgctggtgatgggcaatatacgcttgaataataatcctttggtgcttgttctgaaccattcaatggaaccgtcgatgcggctgttcagtatgccgaagtccagaccgatgttccagttgtacgatttttcccaaccgaggtcggcactgccgtaagtctccgagtattgtgtgaaaggaacgatttttccattgacggagactccgctggcagaatatacgtaggcttgggtagtggtgctataggcgtctgttccgccggagttgcccgtgatgccgtagctgactctcagtttcaggttgtccaaccaacttcgtgtcttttccataaaagcctcgtcggaaattctccaggctatggcgcctgccgggaaagcatcccatttgtgtccggcggagaattgtgagacaccgtcccaacgggtggagaagttgaataagtatttgctcttgtatgaatagttgaggcggaaagcaaaagacattttctgtgtctgtgcgaagtccgattccacatgtggggaggaacccgaagtcaaccgccagaacgaccattggtctaccatctgtccgcttgcggcagccatgttgctttccgactggttcttgttccacgaagtgattaaagaacctcctaccgtatgcgctttggcaagggtcgtgctgtatgctagaatgttttcccacgtgtaattccatgcgttgtcattggtgatggaggcgtgaggcgaacccacataactcggacggttggcgttgcattggtttccccagtattgtcctcgtcgggaatggttcaatgtcccgttgatccggctggtgaatgtgaaatctttgagaggagtcagttcgacatacccgctcatattcaggtaagtggaacgggtgttgttcgcatattgattctctataaaatctcccatcggcgaatactgccctgtgatatattcgtgattgatcttgccttcctcatcataggcatcccccaacgggaaagcggagagggagcgggtaaacgtgtttttcacgccggaattcaaatcacggtacaccagattggaggtaaaaccgactttcgcccacgaaaagagttgctggtcgatgttgagccgtaaagagtaccggttcagattttcattgctgagcaggccttcttcccggttgtaggaggtcgaagcgaatatccttgtcttttccgttccgctgcttaccgaaaggctgtacttttgcgtggtagctgtattgccggaaacctcgtctacccagtcaatccattttccggcattatacgcatctgtaaaagcctgcttgcccagtagggcagacatatcggaagggaaatcaccgttcttatatcggtatgcctctttctggtaagtcacccattcatcctgagtcattccgtgtttgtagttgggcgatccgctgaagccgtaatacgcgtcaaagttgattgtggctttgccttcttttcctcttttggtggtgataatcacaacaccgtttgctcctgccgaaccgtaaatggcggtggatgaagcatccttcagaacatcgacactttcaatatcggaagggttgacctgattatagcttccggggattccgtcgataataaacagtggctcgttattgccatatatggaacgcgaaccacgcagcaggatgctgacttcaccgcctacctgtcccgatgttttggtgatgtccatgccgggtatctttccttgaagagcttccatcacattactggtaggagcagccagtacctcggcacttttgacagaggttaccgctcctgtcagatcccgctttttgacggagccgtatcctactactaccacttcgtcaatcagtcgggcatcttccaccatcgtgatttccagtttacttttattacgtgtgctgacttcctgttctatgtatcccatgtaagatactttgagtactgcgttgggcgacacacgcagtgtgaagagtccgtctacatttgtaatagtcccgttgtttgtgccttt

SEQ ID NO: 4648 - DNA, 1998 bp, Unknown
  gut microbiota DNA sequence
tgatccgaatagagaccggataatgaaaggctatcttttgatgatgaacaatctgaagaaatatgtgaacaaggacggactgtggaatcagctgatagaccagcccgacttttggactgaaacatccggatctgcaatgtttacctatgctatgatcttgggtgttcagaacggatggttggataaagaagaatttgctcccgttgcacgcagagcctggttgggcctgtgcaattatatagacgataaaaatgaccttaccgaagtttgtatcggaacgggaaagaaaaacagtaagcaatattatatggaccgtcctcgcattgccggagattatcatggacaggcacctatcttgtggtgtgcttatgctttgctgaacaataagtaaaaaacagatatattctgttgtataagttgtataaaaggagaggatgtccccactgattggagacatcctctttctctaaatataacaatataaaatgattccttatactgtcgggtccggtgcttcatcaccgccgtcattaccgccttcgtttcctccgccttcttcaccaccacctgaaggagcagaactgctgtttctggttacatccagtttctgaatgctgacagactttatcatatttttcagcaactcccccggagtaaagatgattttacggtttttcaatgtttccgtagtgacttcctctgcgttttcttggcttttgcatccgaaggaaggacggaaagttccaaattcccccaagttgacggatgctccgatttccatgtacgttatcaaagaatcaatgagtccgtcgaggacggcttttactgtaccgcgtggaacgaatcccactttggttacctgatcgcacagcatcttaaaatcaacgttgactacattgaacggacgcgctacatatttttctgctttggtatcgtcgaaaccaaaggttgtttttttgactacatatttcagtgccataatttaattttagttttttaaatagtttataaatcgagtttctgttttgtgatcacgatgcaaagatatggcatctgaaattactgtgcaagttatttttcgaaagtgcgttaaacaaataattaataatgcatatgttgttgataatgagcgctttttgctataagcttgccttgtagtgtgatagtactattagaaaaactacttctttagatatacgacagtttttcctcctccatacttccggattatctcttctttcaaaaacttattgagtagttcaattgctttgttgcggctgatttctgccagtctcatgaaatcggtacgggtgatacagccatgtttgtccagatgttgtatcaggagggtacggcatctttcttcgttggaatcgttattagtacgatagggtgactctatgcgttccagttgcaatggttccagactctcacgaaactttttgttaatgcgcaggttcaccttatttaaatggatggaaggagaacgaatttctttcttctctatcaccggacggtcacatgtcagtgatagggagaaatgtccgatttccccgacttctacggtccagccttgcgcgagccagtgttgtagctcatcactgacggcttgcaggcaaccttctatcgtggctggactgaagccgttggatttggatactagttcaacgaacttatcggcattaatggtgcctgacggaataacacgtgcataaagtgcctgttgctcctcctttttctgtggattaccactcgtgtataaatcgtaataaacgctcatagttactttatatttttcttgttctacagataatttctttctcttcataaattaattcgtccgcctatagccggacgcaagtttgcctataggcgacgttgcgtttgcctatagccggacgaaagaatgcctatagccggacgaattaatttatgcactcaaagatattacttttttcggagaagggacttagtttttccacaagcacagtttaataa

SEQ ID NO: 4649 - DNA, 11627 bp, Unknown
  gut microbiota DNA sequence
aaaccggaagaaaattcgataacattgataatatagacgaaaaatgagcgataataagtataatataataacagtttacaggcatttccacttcggataatgcttgtcagatagtctgatacaagctaagggctgcgattctttatgggaattgcagccctttttgttgctttatgttaatatttattactaaaatagcaatattcgggtttataataaacttgggggacatttataataaacgatgaaagaatttattaataaacgattggaagttactgcataatcggtcaatatctttcgtatagatatgggtgctgaccttgaaaagttctttgtcctttaaataagcaaatgaattattacaacaattactcttttctttttttatgtcataggactgaaaaccttactgtaccattacgaatgaatcgacaaggaaacaatgcatgactttactactgactcaaaagaaaagcagactatcaatggcgggaatcttcccgccgactgatagtccgctctttttatagtatttacctacttgactctatatcaattggattctcccatgatagtagtggcagatgatccccaagtaaagttgctcttcaatgccgaattggacttcaagtacggttgctgaaccttcggtcccttcgtccattcttccgattcggatgtcaatgtattcaacaggtcttggaagtgcatggaaactacgtgtttcgggtccggattcttgtaatattccaaatattccatcggtacatataccgtgctcggccatgtcttaaagacagtacaccatgttgtcggttgggtagcaccttcatcggcatcactacgggcaacttccttacactggaacggtaatgactttaagtgcaaagtcttgagtgccgtcacattatcaaagatgtatccgtaaacataagtcatggtactcgggaaccaagcttcatttactaccgaattaccgaatgcatggcgaccgatataagtcggaccttcgttcaccactaccgttctcaacttggtacagttacgacaagcttctctcggtacgtattgcaatcctgtcgggaatgaaatattctccagaaggttacatccgttgaatacaccattcttcagcgtttcattctccacttccgtcatatccaaagttttcaggttgtagcccttacccgctgtcatcatgttcttcagtaagttcaaatcggtatcgttgagtctgcccttcaactccaggctagtgatggattcccaatctttatagatttcgtcatcaataagactctgcaatacatttgtcaaacctcccggagccggaatttcaatctgagtggccgcagcctgacggataaccatatagtctttcttgttttcataacccttgcgatagatgtaaacggtagcctgacgttctctcagtaccttattcacatcgtacgtgaagatgacacgttcgggcatggagttgtttgccatatgcagccaaccattctctgccgtatagccactttcttccggatatacgatatccaccaaaatctcgttcttcggatcggtcaacgtagactgtacgctatacttcacggtagcggcactgcccagcttatccaaacttattctgaaatcgttcttgttggtaataaccagttccacatcgcttgcctgagcttgagtcacgataaactcttctctcaccttcttgtcggcagcggcacaaagcgcgatcgttgccgtacgttcgccaccggtattttctttcacggaaacaaggaaggtagagtcgcccttggcatctatagcaggcttgaacgaaatccaatcctgatcgttcttatcaatatcaatcgtcaaatccctcggtccgttggtattggttgccttatatttcaacagaatcgaatcttctttcgatgccaggttagtgaacatttccttgttatcgaccgtaatgacaggtttgggtagaccggtctggaagatattcatcgtagcctttacattatcattatctttcgaagagatttcaatggtacctctacgaatatcaaacttctgattcggcaacaccttaaagtacagtgtatggttttccatcgcacgtgtctccggttcacctgcggggcgttcgtctgtcggcatgatccagcccgtgtcaccggaatagaggaaactggttttatactctcctgtgttgattccaaactctacggaaataatatgctcaccggcatccaggttttcgtaggccttcgggtcggtgattaccaccgcatccttctgtgcctgatagataacgaaatcaaacttaaagccaccggacacgagagaaaaattagcacggcgtgcatccggttccacattttcggctgcagctacccatactttgttgccttcgccggccgttccttcgcgttcaaacagcactacccagctattatccacaccttccgaatcatccagtacgatatgccaatcctgattggcattgaatgtcagtacttgagcggaatttcccgcagaagaaaaactgaaggtggacgcttcgttcacgatctccaatttaggctctagcggcgtcaccacttccggaccggtttcatcgtcaccacatgcagtcagtaacgatgccaccaaacatccggtcaagccgatatatttccaattgataaaatttatcgctttcatgcttatttcactttaaattcttcttttacaatattaaggtatttcataccgtatccattcccgtaattcgggtcagtcggttcgatagcctgatccacattccaacggttaaaagaatcgatgatgaccatcggacgctttcccaaattcatcttggcaacattacacatcttacggaacatatcttcatccttaaataccaccgggaagttatagaactgagttccatcaccatctatccactgattgaacgaaggtgaaacgctaggtacgaagtctactccgtaattagcccactcatattcgcggttgtacttaaagttctggtcgatgcactgcggatagcaggtaggacggaaccagtcggtctgattgtacatattatccatgtacacagcatccacttttccgctcaggaagaagttatgccagcgtgcgggaggcgtccagcgttcctgacgtgctaagatatagatctcaagcccattgccattgccgtcttttacattttcacgtactctttcacggatcgtattataaagtttctcagaatcgcgtgcatacaacttatcagcattccagactacaatcatcggtttgccgtctacagtatagtaaagatcgttgttcgtacagaaacggcttgtcaggttgacaaaaaagctataaagttgctcacaacgtgcagagacaccattttcatcggcatcatcttctatcatggcggtattattcagtccgcttgcaaaattattcatatccatagaaaccgcataacgcaaacctccccactcaataccttccgagttgggattcagtcccgccatatagttcacgaaattcacgttaccttcgttcagcaaatctcccttactggtatccagaccgatgttcggcaagataaggaaattgataccggcattatttgcccaggtaaggtgctgctgaatcaagtcagcagtttcggctttattgatatccatcgaataacgtcccagcaccggacgcacattcggacaaagctgtggatactgtccgctctgattatattcaccaatcaaccgcgcatacttcttttcatccacccccgtactacccaagttccaataaatggctcctaccggaatatcgctgctcggtctgatttgcggaatctcatagttcaagaaatgatcatcgatggaaggaccgtcatctgtcggtgaacaggccgatccggccaccagtcccaacgtcaggcatattgcaagacctgtcttattaaaaatcttatactttttcatttttcagtcattacttaattactacttttctaccttataaactaaaagtgtagcttctatcaagaagttataagccttgtccaaagcctcttcggcatccttgataccagtcagctcacgggcattcttcaagaactcttcataagtctgtccatacttcttggcttggaaatccatgttgaactgtacataatcaatattctcccagctggctatcatttcttcctgattaggtacaggttttgcgaactgaagcattgtgaagatattgtctccccaacgggcggcattaggcttcgggctattcttctgtaacaaatcgatagctctgtaataagcctctgcatttgtctgacgttccgcatccgggaagtaaaggcgttcgggccagccatagtacatatttccgccttcttcataagcctgagatccgttcagaaacagaggcggaaggttcaatgcacgtgtgcggcgttccatacgccaggcagacattccatccaggaagtcggcaaaccagcgttgtttgtagatttgttccaactgtccttctttaccgtctgctccgttgatgtcggcagtcatcagtttacgggtatcatagaatcctttatgactggttccccaggcgattccttcctgagccatataggcagcagaagaagcagacaagccgttctcttcgaacgaagcacggatgccttcttcataataggtctgtgcatccttggatcccaagtcgaacttcactttcgcctcagcgcaaaggaaacaagcatctgcccagcgcagtaaaggcatcgtagcgtccattgcataatatctcgggttgatgtagcatctgttgtcttcattcattgacaacggatcagggatttctcttgtaccgttcgggtcggtcgggtcgatcggtcttctccagccgaacggtgtacgggcacccggattgtccggtgtaggaacgtatggaatggagtaacgtacacgcaatgaatcacgcacttcatatccatctatcatccattgcagatgttcctgctgatcgctggcagaacaaccgctcacatcacagtcgtgtgaacgagtcagcacatccgtcatacgataaggctggcgttccggccaataaacgttggagccgtcgaagtaagtctccatacgcggatcgttgtatgagaacagataaatggcgaaatattcgttcatggaagggatcagtccccagtttgctttcgtctgaatttcttctttatacaaacgagtgtaataccaggaacagtctttgtcgatcaccgttccatatttgggagcaaacgcatcgtccagagaactgaacagccattcttcatgtcccatagatttcgcagcatattcgcgtgctttctcttcgctgatgttctggatattcatggctatctccaggcgtaatgtattagccagtttacgccatttctgcacatctccgttataaacagggtctttcagaatcttatcagtggatgattcgtcgaactcatcgactgcctgatccagccaacccaaaatggaatagtaagcatcggcttccgaatcataatcaaagatacgcttgtccgttcctccgtccataccggcatggcttagtccgaccggaccatagagtgacagtaactggtagtaagtgaatgctttccatgtctttacaacagccagactgttaggcaaagagccatcatcgtatgcttttgccagctcttccaggtcgcgcagaatctctacataaaacttacggtagaatccgtctcccctttcgttccacggtgtctggaaagcgacgttagtaatgtaacgtgaataactccacatacggttattattcaattcactgatcgcattcattgttttgtaaaccgtaccggggaaaatactctgtagatttacctcatacaatttgttcgggtccgagttggtggtttcgaaaccgtccgtacaccccacggcagtcgatgccagcaggagtaacggtaatattttgtttttcaatttcatgctttacgaatttaaaaagaaactttaatatcaaatccataggttgcggaaggcaggttgaaaccacgttcgaaaccttgtgcatttcctgttgtactcgttgcctgcggatccagcccgtgcggtgtattggcaaacagggtagcaatatttcgtccgacagccgccacacggaatgtctggaacggagtctttctcagccattttttcggtaaatcgtagctgacagtgatttcacgcaacttcacataagaagcatcgtagatgaaacgggaaatatcacgagaggtatagtgcatccaatagcgttcgggggtacaataacccaatacttgttgtccagccagcccttctacgtcttcgtcataacggcaattaggaagaactacccctttaggacgtccccagtcaggataaatctgtccgtttgcagtcggtgtgttggcgttctgaggacgcatgaagccatatcgttcttcgtccgactcacccaaaatctttctggagaagaaatccgcgtcacgaccttccaatgatttgacggattgtccgtctacagaactctggatggatgtctgagagaagaacttaccacccttctggaagtcgaacatgacagagaaggagaaattacccaaacggaacacgttgttccagccacctcgccagtcggcttgtacacagcctaaatattcatagtcctgtccttctttcggcgacccgtcgagctgacaaagaatgtatccttcggcatcgcgcttaaatgtcttcgcatagatagcaccgtagggcttgcctacttccgcataagacttcacgttgtacacaccgctaccaatctgtatcttgtcgataccttcaggcaatgattctaccatggaattgttctttgaccagttgaaaatagttttccactcgaagttcttcaccttcaccggtacaccgctcacggagatttcccaacccttattggatattttaccggagttgatgattacacgctgataattggataaataagaaagttccgactcgacaatctgatcacgagtgtatttgtcatagtaagtaacatctgctgtcaggcgtccgtccagcaaacggacttccgcaccgatttcttttgagatggttgtttccggtttcaagttcggattcttacgtacggcgtcgccctggaaccatgccatgtcattacggaacagacctccgtagctgtaactgttaatcaaacggtcgaaaccggcatcgttacccacgcgggcaatagaaccacgcaacttggcgaatgagaatgtcttgctcttcagtttggggaagatttccgtcaacacggcactggcactaccggaggcatagaagtaagaattgttagctttcggcaaagaacttgaccagtcattacggaaagttccgtctaaaaacaaaccatgatatcccaaagacaacataccgaatacggactgcttctctttcgcgttcacactttccgtcccactcaatattgaggcattgttggacaatgacttcacatccggagctgccaattgagaaacctgattccagagtttataccagtcattcttttgcatggaagtacccaagttagcactgaggctgaccttcttgatattgcggttataagaaataactccttcatagttgtagttgttggaggcctcacggaaagtttcgtactgtccatcgatatcccacatggtataataattatcgaacttccaaccgttcttgtttgccttttccacactggcacgcaaacggatattcattccctgaatcggtttgatattaagagtcaggttaccacggaagttattacggccgtcaccattgctgatttcgttcagcagccagtaaggattgtagaatccgttaccacgcgtgaaggcttcacctgtctcgcgcttccacggcagtaattcctccataacaacgtcacgcggcatattcatgatggcacgcatcgggttacggttactgtcacctttataatcacggttatcggctgtttccagctgatagttaacggagatttcactggacagccatttagccagatccatattcacacgcaggtcaaatgtgtgacgcttcatgttatcgaagttcttcagcattccgtcgtagtcgatacccgtatagttgaaacggatacctgctccattaaacactttattgaccgaaacactatgagtcatggctacacccatttcgtacatatccgtgataccatccttattaggtacataagaacgtatctgattattacgtcccaccaggtcaaagcctaacatcggcaacccccatgagcgttgattcggatttgcccagttaaatacaaaaataccataaggcaggctggggtcataagcataaccgttctttgagttggaaccataatagttgaatccgtcacccacaccgacagccggaaggctggccgaaccataaacattctgataggcaggaaattcacgcaagaaagtaaactgcatattgtagccataagaaacaccgagtccggatttctttgtagccttacgggtagtgatcagaataacgccattggcagcatcagatccatacaaggcagccgcattggcacctttcaaaacttcgattgattcaatatcgtccgggctgatagctgaagcaggattaccgtagtccaggtctccatcttctcccatcgggttcatgatgggcacaccgtcaattacgtacaacggctggttatttccggtcaaggagttgttaccacgaatttctacacgggtagaagacaacggaccgccattcgagataaaattaacgcccgaaactttaccgctcaggctattcaataagttcgggtcacgtgtatccagcaaagattccgtgtcaatggactgacgggcatatcccaacgatttggattcacggctgatacccaatgccgtaaccacgacatcgttcagttctttgacatcctcacttagaacgatgcgcagcagatcattgtttttcaaggtagccagtctgatagtctttacagcataacctatgaatcttacattcagaatagcatctttcggcacattgttcaaggtaaattgtccctccatatttgtcgcagtagctaagttttggtttccaaccaccgtaatattagcacctggaagcggatcaccaaactcgtcaacaacgactccagtgacctttcggttttgcgccgaaagtgaaagtgcgaagaacgtgagcaataccatcaggcacgtccctatcctccagcttcttttcagataaagtttctccatattagcttaagtttataattaataaatttgttcttttcatttttctacagtgatggtgaagtagttcaaatcaggtttacccgccacaatgttcagcacggtacggcgccagccgttcacatcgctcttcatggtgaaagcgtcgacagtaacccattcgcctccggtagcaggaagttctacgacaggaccttgtcttcttttcgtgccttcgccaaagtcaaaacggattttagcatcttctttggcagcataacataccttgactgtaatatctccggcagcataaggcagttctttccattccatccactcacccgcctctgtgctggtgacgtaccattcggtgttcttatccggagccacaccggctattttggcaacatccagacttccggtacggtattgattaccgctattcttagcagatacatcgaagaagtaatcgcaggcctccatttctacacggaatgattcggcccatgcccggctgctactgtatttacggagaatgttcagacgctgattggggaagtcatagtaaatgttgtcggtacttctccaataagcagcattctcggccatatcggtaaaaccttccaggaagaccagatcagcactcttcgcaaccatatcgtccaaagcatccgtcaaacgtttgccgtgatctgcatcaaaaaacatacgggtacccgatttatcattggtatagaaagccggaacagccacacctacagtttttccattgaaggtacgtaccgtccaggaactacgggtgggagcctgctcagcagcaataaaccaatcgttcagtgattctacgactgattcgtccacctctttatcacggtcctgaaaggctctgtcggcacaaataaagagatcttcgccataagccgacttgaagtcagcatgaatcttgttcagaatagtctttaatttgcccttacagtctattttcttattgcccaatgcagcatagtctacattaaggaaaccattgatgctccacaaaaataggacaggtttgccgtctatgcgaagaagatacttgttattggctttattctcgccataaaagttatcgaaggccagttttatattgtagtcccatatatacttatatatatcgtccaaattgtccagcggatacatcacctcttcatcggtcagtcccttgttttgctgagtttcggcattaatgaatgtagcataagtctggtacaaatcaaaattgcgggcagccgcccaagaagccggacagtcatcgaagatggcaatcttcagattttcttcattccggcgctgtaaagcagcaatgaaatctttgatacgggtaggatcaccatgatctctgtcataagcaggatcagtgtcggccttcggcaagcgtccgcggcaattgggagctacataatccaaaccactatacaccatctcttccaccagattatcccaccactctgtttccgtagctccaaaagacttcacttcgaaaagcggcttattataaaaggttgtagaacttgtcccgccactggcagcatcttctccattgcggagattcttctggaagctgaacaatgcacccatcaggaaattatgttcgggaatgttactctctaccgcaggagcaggaagtatgaacgtcccttctgtcggtataaccgggtccggattagtctcaggaacaatagtattgtcctcatcagaacagctaacaatcatggaagctaatacaagccccatcgtgattttcaaataatttttcacggtctcttttttatattatacatttgctatttgttacacctcgaaaacaccctttttatctattatttaagaaagcgtcgactgaacaaacttaatatttaaggttatttttgagttctgatgcaaagtaacaagagcctgcttaagattttttataaaatacgattaaactctgattaatttctaattaattttaaaactaatactatcttcttataatttttcgcaatcttaggtattaatttcgggaaaagggggaagttttatatcctataatatgctgtccataccctatttatttatccaaatgaacattcatttcctgcaaaaagaagaatatttcaagtagaaaggctaaaaaggggaataaggcaaatactatacaaacataacacaaatcaggagatatccaattagtaacttatccgattatataagatgtggatttttagtattacaatggcgttattcctggtagattttcaaagcgctcccgtgattatttgcataaattccgcattta

SEQ ID NO: 4650 - DNA, 26253 bp, Unknown
  gut microbiota DNA sequence
atcctcgtttgggactacttgcaacagacgttgccaacaatacagtgaacagtagttactggttgagaaatggttctttcctccgattgaagaatgtagaagtaggatataagataccttacggacgtattttcgtcagcgcagccaatctattcacctttagtccgtttgacctttgggatcctgaactgtcttcttggaacagttatcctatgcaaaaaactgtcaatgtcggaattcaacttcagttctaatttattatgagaaaaaatatgaaactaacacgcatctttcaaaatataagtatagcagttattatcactgcattgggcttaacctcatgtgattatctagacgtcgttccacccgaacaacccaatatcgatgacgcaatgtcaagccccacccgagctttaggatttctttattcctgttatggaggtgtcagtacagacttacccagtgcctatctgggggaaataaactctacgacagacgaatatgtattaccttattcatggaacacagacggttattggggcgcctatgcatttaacactgcatcatccactaaccaagactggctatggggaactacttaccaatatataggacaatgttatctgtttttacaaaagttggaaaatgcgggaagcgacattgcatctgatgcagaaaaggaacaatggagagccgaatgccaattcctggtagcttattaccacttcgctactttaagaagatatggtcccatcccaattacagactcgtacattccgatggataccccaacgtcagagtataatggacgttttcactttgactattgtgtagactggattgcgaaccagctggatgaagccgccaaagtacttcctgccaaccgcaccgttaccaatgaatggggtcgcgctacatctactatagctaaagctgtaaaagcacgtttgttactttatgccgcatctcctttatggaacggaagtttcccctaccctaactggcagaatgagaatttcgagactccgggttacggtaaagctttggtaagcaatacttatgacaagagcaaatgggaaagagcactggccgcatgtcaggaagcacttacattagctacaacttccggtgaccgtgaactttacgatgacgacgaatattactcccgacaatccctgaacttaccttttgttcccggagtagcagacgtggaagataataaagaattcctgaaaaacgtaatgaagatgcgctatgccgtaagtacacgtgaatctgaaggaaacaaagaaattatctggggattatccaaccagtttgatttttattcccgttatccgcttcgtattctgaagaaatcggatggaacatggcatgctggttatagtggtgtatctcctacattatatacgttcgaacatttctatacagctaacgggaaactacctgaaaaagaccttgactttactccttcctctgaatggtttgagtcagcaggtatctcttcacgggaagacattatcaaattgaatgtgggtcgtgaacctcgtttctatgcatggatggcttttgacggtggtgactacggaactaaatttgcggccggttctcctctgaaactggaaatgaggaattcggaaatgcacggttacaatccgtctctatttaatcgtgaccatagtgtcacagggttcctgacacaaaagtttgttgatccggtaactgaattctatacagccggcggttctacaagcggaacaagcgcacctactatcttattccgcctggccgaactctacctaaacgtagcagaatgccatgcagcattaggaaatacacaggaagccattgatgcactaaatcctgttcgtgaacgtgccggaatccctaaattaacattggctgatatcacaaataatatgacaataaaagactgggtacacaatgaacgttttgttgaattatggaacgaaggtcaccgcttcttcgatgtccgccgttgggcagaaggagccaagtactttggagcaaacaaacgggaaggattgaatgcagaagttcaaagtcccacattcgaagaatttaataaacgaactacagttgatgcaccttatgtgtgggaaaaccgcatgtacctgaatccggtattctacaacgaagtatacaaaaatccgcaaatggtacaagcacccggatattaattattttttattcattcataacaatatagaatatatatgaaacatatatcaatagcattgtgtttgtgcgggatgattctgatgaatacttcctgcgacaattatgacgatacctatccgcaggaatatgagaaaatactatcactgcagaccaccggtgagcaagccgtagatctttataaaacaggagaggctactaactattcaataacggtcattaaatccggaagtcaacccacattgacagcttctgcccatatcggtgcaatggatgcagtcaattttgagaagtatatctccgagagaggtttggactatgtggcaatgcctgccaattgttattcgttcaacatggaagaactcgattattcttctgctgaaacctataagatcatcaatttacagttgaataccaacgagatagaaatctttgagcagactcttgaagagggacaaacgtgtgttcttccaatcatgctgaccagtacatccgattccatcctggcggataaaaacacattagttctgaaaccggagattattactccatctctttcagtcactgaatccagttcaggaaccgtgactaaatatttatcacaaagtggaggtatcattgatcttgctttaggattgcaagtcgaaaaccaatggaatttcacctgtaaagtagcaattgatgaaactactactaccttagaaggagcaacgttagtttcggatatcatctcatttgagcctggaaacacatcttctgttcaggttaatatccctaagtttacgaagacctccggaaatgtgggtataaagattctggaaattaatggaaaagacggtttcgaattcgacacgaatccatttatactggttgcatctgttgaaaaatacagtctgacagcggacatgctttccagtaatgcaatagaaccgtcagaaggttccttagctaatttattggatggagacataggtacctacttccacagcgcgtggagtgtatcaattgccgacaagcattatgttcaagtaaaattgcccgtatcaactaagacattccgtttcacctatacaaacagatcaaataacggaaatgccgctttggcatggttcaatttatatacaggaacgaatgagaacaatttacaactttacaagcgttttgcgtgggatgaagatggtctcccgtcaggtgctgcaggagtttatgtttctcccgacgtttcaatagacaatgctgccaacaccttacgctttgaatgtgaaagcaactggaccagtggttccttctttgtatggagcgaatttagtctgttcatactgtccgaataataaatgagagacaaagggtgagtcagacttttgattcacccttttatacctcatctatcttaaaaactaatacagcaaaaaaatgacaataaaaagattcattactaacctgttagccctttttactctattcacagtttcactggcatgcaaggataccgaaaaatcgattataaatagctccttcagtatcagtgaagaatatctgatacaaaatctggataaatcaagtacgtctgtccagattccaattaacacatctatggagttagctcaatggagtgtctcttatgaagcaaactggctacaatgctcaaaacaaaagacagcagcagaaggaactttcctgagaattacagtgaatgaaaatacaggcgaaaccaaaagaacagccaacataaaagtaacatcaactactgctacctatactatcaccgttaatcaatatgccaaaggcgaagtaattgttgagggtgacatcaaggttacaccaaccggaggcaaagcgagtgagcatcaggagggacaggatattgaaaatacatatgatggcaaattttcaactgatggagctgcccctttccacactccgtggggacaatccgccaaattccctgtcacgctggaatactattttaaaggagatacggaaatagactacttaatttattatacacgatccggtaatggaaacttcggaaaggtcaaagtatatacaacaaccaatcctgaccgatcagattatacattacagggagaatatgactttaaagagcagaatgctccttccaaagtttcattttcagaaggcataaaagcgaccggaatcaaattcgaagtattaagcggtctgggtgattttgtaagctgtgatgaaatggaattttacaaaacaaatacggataaaacactggataaacaacttcttaccgtattcaccgatataacttgtacggaaataaagaacaacgtcaccaacgaacagatacaagctctgccagactatttcgtcagaatagcagaagcggttcgtgacaatacatacgacaaatgggaaaaagaatttcgcattcgcagctatgaaccatacagtaatattgctgaatgggcggataaattaatgactaagaaatatagtgatctcgacaatccgactggtatatccgtcaaggcaggagacgatatcatcgtattggttggtgacacatacggacagaatatttcaatgcagtgtatttgggaaacaggaacagaatacaagcaaacagcttcttcaggcgatgtctatatgctaaatcccggagtcaacaaactgactatgaaaggagaaggacaattgtttgtcatgtacaacaccgaactgacttcaaatacagcaaaacccatcaaaattcacataccactcggaagtggcacagtgaacggtttcttcgacctgaaagaacataagacagacgaaaaatacgctgaattattgaaaaaatcaacacacaaatacttctgcatacgcggtgaaaagatcatgttctatttccaccgcaacaaattattggaatatgtacccaacaacatcctctcagctatccatctatgggataacattgtcggctggcaacaagaattaatgggaattgacgatgtacgcccatcacaagtcaacaaccatttatttgccatctcaccggaaggaagttatatgtgggcttctgactatcaaatcggatttgtctatacctacttaggcaatatcttgttggaagataatgtaatggcagcggaagataacgcgtggggaccagctcatgaaattggccatgttcatcaggcagctattaactgggccagttctaccgaatcatctaataatctgttctctaatttcattatctataaattaggaaaatacaaatcgcgtggtaacgggttaggaagcgttgcaaccgcccgttatgccaacgggcaggcttggtataatatgggagacgcaacccaccagaacgaagacacagaaacgcatatgagaatgaactggcaactatggatttactatcaccgatgcgaatataaaacagatttctggcaaacacttttcaaactgatgcgtgaagtgaatatgaccgaaggtgaagatcccgggaaaaagcaacttgaatttgccaaaatggcaagtaaagccgccaatcagaacctgacagactttttcgagatgtggggattcttcgaacctgtcaatacgactatcgaacagtatggaacatacaaatactatgtaagtgatgcgatgattcgggaagcaaaagaatacatggcacaattccctgccccgaaacatgctttccaatacattgaagacagaaagaaaagtgagtttccaccgaatgactaccgctattcggcagtcggagatgtcggatattacactcaattcaaagaaaatcagaagataaccaaagctatcacggcagagctggcaggacgcaaggtctccatccaaaacggagatgaagctgtggcttttgaactcagagagaatgatgaaaatggaaaattactttatttttctaccttcacgactttcgagattccttcatctatattgatggtgaatgccaaattatatgccgtacaagctgacggaaaacgtattctgttataagaataatttaacttaacacacattacagatgtagaaacggcatcgctcactgttcgggcgatgccgaaaatatcattataacatagcgaatagtgcgactctttttctaccaaaaatatagacgggcaatgaaaatatctacaataattacactggattgattaattaattagtatttttgacaccgaaatgaaaaaccaattaataacccccaattaaaaattaaaagaaagatgaagaaactactacttaacacactcatcggtcttgcattgttgacctgccagaccagttttgctcaaaagacaaaagcaaagttctctccgattaaagtagaaactccggctcgtccggcaaatcagcaagatgtaatccaactcgttactcctaaacttgaaacagtccgtgtaggctttatcggattgggaatgcgcggtcccggtgcggtcgaacgctggacacatattccgggaactcagattgtagctttatgcgatcttctccccgaacgtgttgaaaatgctcaaaagatactggagaaagccggtctgccgaaagcagcttcctacgcaggagacgaaaaagcatggaaaaagctctgcgaacgtgacgatatcgacgtggtatacatagctacagactggaaacaccatgcagacatgggtgtatacgctatggaacatggcaaacatgtagccatcgaagtacctgccgctatgacactggatgaaatctggaagctaatcaacacttctgaaaagactcgcaaacactgtatgcaactggaaaactgcgtatatgacttctttgaactgacttcactcaatatggcacaacaaggtgtattcggtgaggtacttcacgtagaaggtgcttatatacacaatctggaagacttctggccgtattactggaacaactggcgtatggactacaatcagaaacatcgtggtgatgtatatgcaactcatggtatgggcccggcttgccaggtactcaatattcaccgtggcgaccgtatgaaaactctcgtagctatggacaccaaagctgtgaacggtccggcatacattaaaaagtctaccggaaaagaagtaaaagacttccagaacggagaccagaccacaaccctcatccgtacggagaacggcaaaacaatgctgatacagcacaatgtaatgactccccgtccttacagccgtatgtaccaggtagttggagctgatggctatgccagcaaatatccgattgaggaatactgtctaagacctacacaagtagactctaatgatgtgccgaatcacgaaaagctgaacgcacacggttctgtatctgaagatgtaaaaaaagcattgatggctaaatacaaagatcctattcacaaagaactggaagaaactgccaagaaagtaggtggacacggcggtatggattatatcatggactatcgtctggtatactgtctgcgcaatggtttgccactggacatggacgtttacgacctcgcagaatggtgttgtatggccgaactgaccagactctccatcgaaaacggttctgctccggtagaagttcctgatttcacccgtggcggatggaacaaagtgcaaggttacagacatgcttttgccgaataagccattataccttattaatatataaacttacggatagccagactgggaaaaagtcaggttatccgtaagttcatgttcggcactttactgattattataatcacctatatgaaagcagatattttaaaaccctctagacagactatccttcgggaagccaaagattatgtgatgatcgccgtaggtatgatactttatggcatcggatggaccgttttcctactccccaacgacattacgacgggcggagtgccgggtattgcatctattgtatattgggcaacgggattcccggtacagtatacatatttcagcattaactttttcttattgttgcttgcgcttaagttattgggattaaagttctgtattaaaactatttttggagtattcaccctgactttcttcctgtccgttatccagcaactggcatcaggcgtttcccttcttcgcgaccaacctttcatggcatgcgtcatcggagcatcgttctgtggcggcggtatcggagttgcgttctgcgccaacggaagcaccggcggtacggacgtcattgccgccatcatcaacaaataccgggacataaccttgggaagagtcatactgatctgcgatatgatcatcattacctccagttatttcgttctgaaggactgggagaaggtggtatacggatttgcaacactttacatttgcagtttcgtcctcgatcaggtagtaaacagcgcacgtcagtctgtccagttttttatcatatccaataaatatgaggagataggacgacacatcaacgaataccctcaccgtggagtgacgatcatcaatgcaaccggcttctacacaggcagagaagtgaaaatgatgtttgtgcttgccaaaaagcgggagtctaccatcatcttccgactgattaaagatatcgaccccaacgcatttgtatcgcaaagtgccgttatcggagtttatggggaaggcttcgaccatatcaaagttaaataaaaaaagaaacaagattgaaaaacatgaaatacagatcatatcacctattactggcaggaatattctctctgttaacaacaggcgctatggccgaaaagacatccgacaaaccttactggcaggatgtgcaagttgtatcggtcaataaagaatatccgcgtacttccttcatgacgtacgataaccggactgatgcacttaccgggaagtttgaaaaaagcaactattatcagttgctgaacggtacatggaagttcttctttgcagacagctacaaagaccttcccgccaatatcaccgacccttccgtgagcacggactcctggaatgatatcaaagtcccgggcaactgggaagtacaagggtatggagtggctatctacaccaaccacggttatgagttcaagccccgtaatccacagcctcccagccttccggaagccaatcccgtgggagtctaccgtcgggacatcgatattcccgccgattggaaagaacgggatatctacctccacctcgccggagcgaaatcaggtgtatatgtatacatcaacggacaagaagtaggatacagcgaagattccaagaaccccgcagaattcctgatcaacaaatacgtgaaaccgggtaagaatgtacttacactgaaaatcttccgttggagcacaggttcttatctggaatgtcaggacttctggcgtatcagcggtatcgaacgggatgtttatctgtattcacagcccaaagccgccctgaaagatttccgcatcacatcgacactggatgacagttacaagaacggagtattcgctttgaacgtcgacctgcgcaatcatcgtccggctgcaaccaatctgacactggcatatgaactgctcgacgctcagggaaaagtagttgccaccgaagagaagacaacttatgtccctgtcaacgagacacgaaccctttcttttgacaagaatctgaccgatgtacacacatggacatcggaacacccgaacctttacaagctagtaatgactgtcaaagaagagggtaaagtcaatgagattatccctttcaacgtaggattccgtcgcatcgagatcaaacctatcgatcagaaagccgccaacggaaaaccttatgtatgcctgtttatcaacggacaaccgctgaaattgaaaggagtcaatatccacgaacataatccggaaaccggacattacgtcaccgaagaactgatgcgtcgggacttcgaactaatgaaacagcataatctgaacagtgtacgtctctgccattatccgcaggaccgccgtttctatgaactttgcgacgaatacggactttacgtgtacgatgaagccaatatcgaaagccacggtatgtactacgatctacgtaaaggcggctcattaggcaacaatcccgaatggctgaaaccacacatggatcgcacaatcaatatgttcgaacgcaacaagaactaccccagcgtcactttctggtcgttaggaaatgaagccggaaacggatacaacttctaccagacttatctttggttgaaagaagccgacaagaacatcatgcaacgtcccgtcaactatgaacgtgcacaatgggaatggaacaccgatatgtacgtacctcagtatccgggtgccggctggctggaagatatcggcaagaacggcagcgaccgtcctattgtcccgtcagaatatgcacacgcaatgggcaactctaccggaaatctctggggacaatggcaggctatctataaatatccgaaccttcagggaggatatatctgggactgggtagatcagggtctgctccagaaagacaagaacggaagagaatactgggcttatggaggtgacttcggagtaaatgcacccagcgacggtaatttcctctgcaacggtcttgttaaccccgaccgtggtccgcatccggcaatggcagaagtgaaatacgtgcatcagaatgtcggcttcgatgcgattgacgcagcatcgggcaagttcaacatcacgaaccgtttctacttcaccaatctgaaaaagtatcagatacattacagcgtactggccaacggaaaaaccgtcaaaagcggaaaggtatcactggacatcgctccgcaagcttcgaaagaattcaccgtaccggtaaatggtctgaaagcccgtccgggaacggaatatttcgttaacttcagtgtgatagccgtagaaccggaaccgctgattcccgccggatacgaaattgcatatgaccagttccgtctgcccgttgaagccgaaaggaatacgtacaaagccaacggccccgcattacaaactcaaacccaaggagacgaactgactgtttcttcttcaaaagtaaactttgtattcaacaagaagagcggtctggttacctcatacaaagtggatggaaccgaatacttcaaagacggattcggcatccagcccaacttctggcgggcacctaatgacaatgattacggaaacggtgctcccaaacgcctccacgtatggaaacagtccagcaaagacttccacgtgacagacacgaaggtaagcacagaagacaaagccgtcctgttgcaggcaacttatctgctggcagccggcaatctgtatgttgtcacctataagatatacccaagcggaatcgttcatgtaaatgccaaatttacttctaccgatatgcaggctgccgaaacagaagtctccgaagctacccgcatggctaccttcactcccggaagtgatgcagcccgcaaagccgcttccaagctggaagttccccgcatcggtgtacgtttccgcttaccggcacagatgaataatgtacagtatttcggacgtggtccggaagaaaactacatcgaccgcaatcacggaaccatggtaggcatctatcagacaaccgccgataagatgtacttcaactatgtacgtcctcaggagaacggacaccacacggatacgcgctggcttaacctgtctcccgataaaggaaacggccttgtcatcgttgccgacagcctgatcggtttcaacgcactgcgcaattccgtcgaggacttcgactcggaagaagcgctaccccacccctaccaatggaataacttcagcccggaagaagctaccaaccacgacgagaaggccgcccgcaatgtattgcgccggatgcatcacgtcaacgacatcactccaagagacttcgtcgaagtttgtgtcgacatgaagcaacagggagtaggcggttatgacagttggggggcacgtcccgaacctttccaccagattcccgccaaccgcgaatacaactgggggttcactctggtaccggtccgttccggcagtcaggctaccgaagccaccaaatatgattatcgataaccttagtataaattttaaagaaaagacccatgaaagatttatcaagtattgtagccaagttcaacacccaaggtactatcacagagatcaagcctttgggagcaggacttatcaacgacacatacaaagttaacacacaggaagcagacgcccccgactacgttctgcaacgcatcaaccatgccatcttccagaatgtagaaatgcttcaatccaatattgccgcagtcaccggacatattcgcaagaaactgaccgaagccggagaagccgacatcgaccgcaaagttctctctttcctcgtcactgaagaaggaaaaacttattggtttgatggagaaagctactggcgtgtcatggtattcattccgcgtgccaaaacgtacgagactgtcaatccggaatattccaattatgcaggagaggctttcggaaactttcaggctatgcttgccgacattccggaaacactgggagaaaccatccccgacttccataacatggaattccgtctcaaacagctacgtgatgcagtcgctgccaatgctgccggacgagtagccgacgtacagtattatctggacgagatagaaaaacgtgcggacgaaatgtgcaaggcagaacgcctgttccgcgaaggaaagcttccgaaacgagtatgccattgcgatacgaaagtaaacaacatgatgtttgatgaagacgggaaagtgctttgcgtcatcgacctggatacggtaatgccgagtttcatcttctccgactacggtgatttcctccgtacaggtgccaacaccggagatgaagatgacaaagacctgaatcgtgtgaacttcaacatggagatattcaaggcattcaccaaaggatatctgaaaggtgccaaatcgttcctcactcccattgaaatagagaatctgccttatgctgccgctttattcccctatatgcagtgcgtacggttccttgccgattatatcaacggagatacttactacaaaatcaaatatcccgaacataatctggtgcgcaccaaggcacagttcaaactacttcaaagcgtagaagaacatacaccggagatggtggcattcatcaatgagtgcttggttaatggataatggagaatggaaaatggataattagtggaaatggggcggagctgtttatttggtaaacgctccattcttccactgataaacaataggacggcggagaaacggtttaagtttttctgccgtttcttttgacatatagtcgggagtggacagagtgacagccagttctgtattttccttgttcatatccactttcatcaataagatgtctgcagaacgggaggcctcgtcaaattcgtatatcgcagtggagtccggagtaagcagaaaatcgttcatgaccggcagggtgatgaatgaatcggcagtcagaggtttccagtctgtagtatagaagcggatgctgctgtcacaagccggagcacatgccgtagctaccgtacaaatcacattcgtggtatcattcaaagccaatactttcatctgccaagtggtttccggagtcatctgcatccggatatagtccttactcagatcggtcatttccgatttctgtccgaagcggttttccacttgtgctttcattttactgctcagaaagtcgatgcagtcttcacggttcaccttcgtaagcaagggacaaagtgaatccggtacgttgataaaaagagtctttgcttcctgcgcctgtgaagagacaaaagtaaacagactgatgatgaaaaatgcgatggtataagtgattttatttgatttcatattgtactttttatttagaccccaaatataagaatatcattccgattaacacgaggataaggtcaatcgctttgctttttaaattcttttcacggaagaagagcgctccgaaaatgaaagatacgatcacgcttccccgacgaaccatcgaaacgatggagatcatggagtcatcatagctcagagcataaaagtagacaaagtctgccgccgaaaggaatacggaaatcagaatgatggtccagtcccagcggaaaggagtggtcgtcttccgtttgggccaccagagaaggaagataatggttcccatgataaagaactggtagacattataccacgattgcaccagcatcggattcagctgtttcatcagaaacttgtcatacaatccgctgacagctcccatgactgctgccagtataataaagagaatccatttgttatgcttgaaatcgatcccttctttcttccccgaacggctcaacataaagaaggaagccactgccagcatcactccgatccattggtagagattcagacgctcgccaaacaccagcattgctcctacaagcaccatcaccggacgggtagcattgataggccccacaatggtaataggcaagtgtttcatcccgaagtaaccgaatatccacgatgacagaacgataaacgacttgatgataatatatttatgctgctcccatcctgcaacgggaacattaaagatggttcccccaaggagatcaggctcgaatgccgataccaaaatgaacggcagaaaaattagactggagaaaagcgtattcaaaaacaatacaggcaacaccgcattatctttcaatgactgtttcttgaatacatcataaaatcccagcaaggtagccgagagaaaagctaataataaccacatgttgaaataagtaataggtaataagtaacaagtaatattgagctgactgggaagtcggcagtatctaacactcccctccttcgggaaggagtgtagatagtactgactttttagtttcctctgagaaaatatcttccggatattctacgttgacaaggaagagcgcatttcccggagcggaagttcccgctttgcaacgatcctgttgttctatcactttacggaaaccttccacggtcagtttgccgcgtcctacctcgagcaatgttcctacgatggcacgcaccatattacggagaaagcggtcggcacggatagtaaatacccaggtggtgtcttcgccttccatcttcgtccattcggcatgggagatgtggcagatgtttgtttttacatctgtatgcagtttgctgaaacttgtaaaatcaatgtattcgaacagggttcgtgcagcctcgttcatccgttcataatccaatgaaccatagacacggtagcggtactggcggttgaaaggatatttggcggtagtcacataatacttatatgtccgggcagtcgcgtcaaaacgggcgtgcgcatccggttttacctgacggacacgatagacagaaatatctggaggcaacagacggttcaacttgtcggcgacagtcaccgtatcgagcacgtcttcatgatcaaaatgtgccaccatcagcgaggcatgcacccccgcgtccgtccggccagcacctatcacttccacatcacgacgcagaaaagtagacaaagccttcatcaagcattcctgcacactactcccgttgggttgtatctgccaaccgtgatagttggttccatcataagccaaataaataaaatacctttgcacgccgattcctcattttagggttttcgactgcaaaagtagtcatttttttattcatacgtagaaggagtcgtaccaaatgcatccacaaaatgtttgcggaaagtcggaatgtcattataccccaccatttcggcaacttcctgcactgcatattgtttcgttttcaacagcactcccgcacggcgcatacgtactcctctgatcagttctataatggtatagtctgtactttgcttcactttgcggtaaagggtgggctgactcatattcatttccgctgccagtttcttcacactgaagtccgcctcgcaaatattttcttccacaattttgataacagctgtgataaacggatcttccgtcttcacttcctcacccgcctgttccggttcgctcacgacaattgtatccgttcccggcaatttgaacaacttcgtgtacatctgcttcaacgtctgacgaccattaatcagactgctgactttcgccttcagaatgcccggagtaaatggtttcagtacataatcatccgcacccagctgcagtccgtgaataatatcgtcgtcttctacctttgccgtcagcatgataaaaggaatactgcacgtttccggattctccttcacctcccggcaacattcgaaaccgtctttcaccggcatcatgacatcacagatgatcaagtccggcatctctttcattgccgtatcgactccctcctgcccgttggttgccatcaacaagttatattcattgccgaagagcactttcagatacaggcggatatccttatgatcttctacaatcaatatcgtctttttaactccgcccgctacgggggatgctacttcttcggcaggcaatgcctccgcaaaaagcggcagttgctgatcctgttgcaccacagcatcctctactgccaaatcctgtttctgtgtttctgccgattcgggttccagctctgctacttctgtcagttcttccggatcaataaactgaatattcggattgttttcaaagacatctctgtcggcgggaagattgaccgtgaccttcgtcccctttccttcagtactttcaagagtaatcgttccgtaatgagcttcgatcatctgttgcatgatggtgaatcccatttgcgcagccgacatatcacgttccgatccttcattctcgctcatcaactgctcaacagttcttaccctttcttttccgtcatcttctactatcaggcagacatagtgcatattgtcattcacgacctcacaaacagataaagaaaccgttcccgcataatgcgtatgggtgaaagcatttgtcaacagattatgaatgacgaattctattttctttttgtccacataaaattccatctccttcttgattctcttctcgcaatggaaatcaatggtatacaccttcaacaagtcccggacaccaaaaagagagctgtcgatcattttatccaccgaatacggagcaacttccagttttgattccatattgccctgcccgtatactgccagcaactggtcgcaggcatccaccatgcggagtgagttccggtacgccacctgtagagaaagctgagaagtctgagcgtcatccttctgcaattccttcagcggagcgatgatgagtgacaacggcgtacgcaattcctgcacaaagagcatcagcaaccggttcctcatcgcttctatctcttttttttgttcctgtttcagcttttcgagattcagattctccttcagtatcatctcacggtcacgatgaatctgtttgcgctgatccttctttctgaaataagaatagaagaaataagataatccgccaagtaacagaacatacatgatatacgcccatatagtctgataccatttacccttcaccaccagaggaatctcgattacctccccttctttcccatccgggaaaaccagcttagcctgcaaggcatattttccggcagccaatccgttgaaccacagtccttctgcaagcggtatcattttccattctttgtccgcaggaagcagacggtaagcaatcttgcgctgtgccagtccgtaacgcagatcggaaaagaacaaatgaaagtcgttgttatcggaagcaaacaccagtttctcctgtttttccggagaaacagccagaatcatctgcccgttccgcttttctcctgccagcaccgtttctccaccgacttccacatcggtcagcatcaaatgcttcttgccactatcgcctttggtagcagaaggatcaaagaaaatcagcccccaggaattcgcccataacaagcgtccgtcattcaaacgacagactgcactgcagtttcccaccgacagataactataaaaagcctcctgtccatttctgatggtcatcactcctacattgtttcctgcccatgtgtttccgatatggtcgtcgaccatgcaactgacatgtccgtccgtcaatccactctgcagtgtataaacagattctatcttatccttctctcttccgtcgatgcgaataacgacgttcagataggctgcataaatctgattatagttattcacatacagggttcgcactccggcttcttccagcccattctccttttcatagtttccttccacccgtatctggtcaccgttcgtttcaattcttttcagccctttatccgtacctacccatacatttccttccttatcttcagtgatggcaaatacattcttgatttcaccgggcagctttatatttttgcatccgtgagttttaggatctacctgtaccagtccattcgaagtacctacccacaaacgattccacgaatccagacagaaacagtggacaacagcctgcatcctcccgccttcgctgtttttcaactgaaaagattccacgtcttccgtaagcggattgacagagatgatctctcccaaattgttacccagccaaatgtttccatctttacctttatatatgtgataacgtccggagagaccggatacttttttccatggttcaaaatgtgtatccatcgaaaatgacggagtagtacttctcatgatgcctccatcggtcaccgtcaaccagatatacccttttgcatcttcgaccatgccatccactctggatttgaaattctgccgtacccggctgtacatactgtcgctgatatcaaactttaccactccgccgccaaaggtacctacccaaagaatctgctgcctgttatcccatagcagactggtcatcttattttcgatccttgaatggaacgctctttccccctgtgtcagcagtgtcaatgtaaacggactctcacacaaattcagattctcaaaatgcaatttatataatccgtcccatgtcgtcagataaaacgtctgcttatctttcatcaccatatccgtaacatacgagttggagaaatccggctggtcgcccccctcgagagagactacacgttccttatgcgatttaaggtcataacatacaatatcattccataatctgcatatccataaatatccctgtcgcaaaaagagtctgttcaccacatcatattctctgatcacagaagttcttttggttacgagatcataatgtatcaccttttcgcggtcaacggcaaagtacaggtttgtttttccatccgtgcaaagattagtaatctttccttttatcaaaggttcgggattcaatatacaatagacgaaatcttcttttccttctttcttgcggatgggacgcgattcgaacaatccatgcgaagtagccagatacaggctgccatcattccagcaaaaatcctgaatctctttaagtttcagcggcctgtcaaaacgtacaggcaaaaacttttccatttctttgtcaaaacaggttattcccccctgatagagtgaagcataaaataaaccgtcagaaccttccttcagcgtttttacagcctgatgcaaaggagtggaaagggagtcaacgctcataatgagcggataatcacgaaatctgaagccatcgtagcgggagattcccttgtcggtagagaaccacataaagccttcgcttccgtaacaaacatgataaatagtattatttccgactccgtttttaattatttgcggttccaggtcccagtgggtatctatagagtatgacggaagaaaaaccgtcaacagcaacaacagaaagaagaacttcctcatatcttaattgtattttgttcatgtgtattggctgataaagatatataattaaatcattagcaaatcggataacaaatattttttagcaataattcacaataaagtaaaagcccgctgattcgtaaaagaatcggcgggcctcccattgtttgtttcttaattgcctgaatgaccaaagctatattgtttgctgtctggttcctctttttgtctgatggaatctccgtgcacggcgcaaggagcccttttatataagttgtatatattgtaacgtaatacctaaaatcaataaattcctgttgtattaattagctgctttggaaagagtaaagctataagttcccttattatccttgaagttgtagctacctttaaagcttacgggtaccttaaccaggcaattaccctggtcgcttacacggaaatagagataagaagtcgagctgaatacactgtttccttcagcagtagtagataaggaagctccataaccctgccagttgaacaggtcagtcgaggaagagtatgtagtacctatataaaatactccgccgttattatcaatattaaagttgatggaaacacacaatgcgaattgttctacgaaagcaccgcttctggtacgggcctgatattctgcgatcatcttcacttcttttctgtcaccaccttcgtagtatccttccaaagtttccgattcacagttacggatagtattaccattctgacgaagcgcttcaagcacacttgccatttcttctgcagtcacagaaggtacatcacctactttagagtcaacagttgcagattgtataccatataaagatatcatggattcaaagtttgaagagttgtcttcaaaactatcactttcagcattagaacatgctacaaaagttaatgccaatacacatgcgaaaaagaatttaattgatttcatattagtacctcctaaattttatttgtttttttaatttgtttgcgaactgttgtttgttatttcgtccgcttcttacacttcatattgtttatctgttcatgttccttaggagggaatcttttaaacttaagttgtcttatttatcttttcttgtttgtttgtacactgcaaacataggcgttttattcaatagaaaaaacttttcaggagacaaaatgaatgaattaccactctttaacgaacgaaatacagcttattcaagcacttgaataagatatgcaagtatcaaatcgccgctcatctgcgattcattcaatacgagcggtaaaaacaccacctattaccaacgaattatatgccacctataaaaagaatgatataccaccccacttattaatttccattgaaaggaaagagaagaaagatgaatccaccaattaacgtctattcatataaccgttacttttgcaacatcaacaaacaaaacccatcatgcgatgaaaaagaaaagaatcttatttttgttcgttaccttgtttgcttctaccttattatatagtcaggtagtcggagtgaaaaccaatcttgtaatggacgcgatgaaaattatcaatctcggagccgaagtcggtctgagtaagaagttaacgctggacttgtatgccaactataatccgtggaaatacaaagatcagaagatgatgaagatgctcgccatccagccggaactccgttactggttctgcgacaagttcaatggacactttgtgggattccatgtacatggaggcgtctaccaggctgccgccatcaatatgccctggggcatctggccggaactgaaggaccaccgcttcaaaggcaatttcttcggtgctggtatttcctacggttatcaatggattcttgccaagcattggaatctggaagggaatattggtgtaggttacgcacgtgtcaagtatgagcagttcgaatgcaagacgtgcggtgagaaggttagcgaaggacataagaactatttaggtcccacgaaagctgctatcagtttaatctatttattctaaaacaaaacaaatatgaaaaagatattatgcatactcttttgcctgctgcctgtattgggcgggaaagcgcagacactttatagagatcaggtgcgcatagagaaagaatctatcacacgcaatgaagataacaatgtgctgagcatcgatatggatatcgtgatgcaggagaatctgaagctctcctccaatcatgtcgccaccctcactccgttcctcgaatcaaatggccgcaccaagatactaccttccatcgtagtttacggtcgcaaacgtgaagtagtaaaccaacgcaataacatcgctccttcggaaaatacttacagtgttatccgtcgcaagcataataaagaacagattatcaactaccaccagcaattccagttcgaagcctggatgcgtgatgcggaaatgaaactaaatattgatgtatgcggctgctgcgacctgaaagaggagaccagcggtgaattaatcacccgattgaacattttacccgtgcagctacagcccgctatatcctatatcactccacaggcagaagccgtcaagcaccgtgccatagaaggaagcgctttcctcgacttcccggtgaaccaaattatcatccgaccggagtatcgtcgcaacacagtagagctggccaagatacgtgctaccattgacagtgtacgtaatgatgacaagacaacgctcagcagtataaaaattcacggttacgcatcaccggaaggtggatatgccaacaatacccgactggcaaaaggtcgtacacaggcattggtagattatgtgaccagttattacaagttcgacaataaactgatcacttcagagtatacttctgaagattgggaaggattccgcaagtttatcgcagcttcttcattggagaagaaggacgagatactgaaactgatggatgactcgacactggacatagacaagaaagaacgccagatcgctcaattggcaggtcctcaaacttataaatatatattggaagaatgttatccggctttgcgtcattcagactataccgtcaactataccgtacgcgggttcaatctggaagaaaccaaagagattatcaagacacgtccgcaactgttgagcctacaagaaatctatcggattgcgaaaagctgtcagccgggaagcgaagagttcaaccgttcgttccaggtagcagccaccatgttcccggatgaccctattgccaatctgaatgcaggagccatggaaatacagaaaggcggagacctgacaacagcgaagaagcatcttgccaaagctgatcagaaagctcccgaaacgctgaataacctgggagtcatcgcactgctggaaggcgactacgatgcggcagagaaatatttcaatgcagcaaaagccggtggactcaccactcaggctgacaccaatatgaaacaactaaaaagcataagaaattaccccaaagaataacaacaaacaattttaccccaaaacacaaacgcaccacctgagaaggcagtgcgttttttttatatcataatcatcatatcatcggcttaacaatctccacttttaagcccaatgcatcaatgatacgaaagaaaagtccgactcccggctcaagcgctcctttctcaattctagatatataggacttgttggtacctaccttgccgtacaatttgtctaatacagcatccatacttccaacgtcagggtttacttgcataatattcatttttaagttttactgccttttcaatctcactttcgggcgttttttgtgtctttttctgaaagccattaaacaacatcacgatattgccttcatcaaaaataaaaaaagccccataaatattcatggaatgtttttttattttcaagcgtttcagccctttcagccatccgccacaaccgcctgccagcaggcgaaagcggctgaaagccgcccccgaaaaagcaccctttcagccttcagtcctttcagccgggaatttaccggagcgtcggctgatctctggatgtcccgtagaatccgggaacaggaacatagatcggctgattacgcaatccgagattctgcaactttccttcctggcaaattctccggatatgaatcatagccgtagaacgtaccatgccacacaaagattggaaatctctgcgctgcatcatctgatgcgtactgaaatactccttcagcaacatatcaatctctacttccgaaagtttggacgaatgaaaattcttcttcagttgctttaccttaattaatccgatagagtttttcaatttctgatccgaacgaaagcggatagccttcagtttgattttcatattccgtcgtggagtgtcggcggctatctcttccgtagcagtcagcgtggggtaaaaatagccgatgccgtccaaatgcacctgccgtccttctcccaactcctctcccatcacctgcgaaagagcatccagtacagcagtcacatcgacttcattcagcgtacaacgggattgaatcttactcctcatttcgtccgtatctacctgaccattgtaagcaatgcggggatggaatctttttttcttcggttgatccggtgataccgggttctcataccagtcaaataatatagccatagcttcctcttttattaaataagtacttctaatctgttattcctacggaaacttccgatgaaagaagcttcattttcatcggctaatgtgctatggctgcccggctaatggagattagccgattgactaatgaaggatagctgatcagctaatctgcattagcctctgatgtttgcgccttcaaagatacaacagaaaggcaggaaaacctaatgattcctacgttatttcataaacggaagtatttaaaggaatctatcgaaaacacttgcaaatcgctatcccggcattgtaactttgatgcacgaaacttaaaaaaaagaacaaatatgatggaaaaagtaacccaaatgatcgccatgctgataaaggcatggaaaaaagagagcgtatcacagattgacacacctcccgttcccgcaacgcccgaaccgaagcagcagtcccccaacaactccgcctgcctgacggaacgggtcaacacctttctgcaaactcactatgacttccgctacaaccgcctgacggaagaaacagaatttcgcccattaagcggagcaaagaccgaatttcgtcccatcggaaaacgtgaactgaacaccctctgcatggaggctcatgcagagggcatttcctgctgggataaagatgtgagccgatatatttattccacacaaatcggagagtatcatcctttccggctttatatggacgaacttcctccctgggacggcatcgaccggttgactccgcttgcccgacgtgtatctgcactacctctatgggtaaaaggattccacacatggatgctgggactggctgcccaatgggaaggaaagacgggtgtccatgccaacagcctggctcccatcctgatcagtgccgaacagggacggatgaaatcgactttctgcaaatcgctgatgcccaaagtactgcaacgttactatatggataatctcaaactgacatcagaaggacaggcagaacgtcttctgtcagaaatggggctgatcaatctggatgaattcgacaaatatgcagagagtaaaatgccgcttctgaagaatttaatgcaaatgtcgagtctccacgtctgcaaagcgtatcagcgtaacttccgggacttgccgcgcatcgcttctttcatcggaacttccaaccgctccgatctgatgagtgacccgacaggcagccgccgtttcttctgtgtagaagtagaaaagccgataaattgtgagggaatcgagcatgaacagatcttcgcccaactgaaagcggagcttgccgacgggtgtccgtattggttcgacaaagaaacggaacgtgaaatacaacagaataatgcacccttttaccgtacttgccctgccgaagaggtatttctcagttgtttccgcacctcagcctcagcggaagagaaatatctgcgactttctgccgccgatatttataaagaactgaagaaacggaatgctgctgctctacgaggtttcaatccgaaccattttgcgcaagtattgataaaaatgggggtagaacggaagcatacggaatatgggaatgtatatttggtggtaagacgatga

SEQ ID NO: 4651 - DNA, 2801 bp, Unknown
  gut microbiota DNA sequence
aaacagtatcaagaaacaccgctatggaaaaatacactgtttgtactcgttcccgatcatcagggtgcatatccgtatccaatagaaaatccgctggacggccaaaccattccgctgattttaatcggaggtgcaatcaaacaacctcttgtggtagatacctatgcttcacagattgacattgccgccaccttgcttgcccaattaggattgccgcatgatgaatttactttcagcaagaatatcatgaatccggcctctcctcattttgcatactttacccgcccgaactatttcggaatgattaccgctgataaccaattagtgtacaatctggacgcaaatactgtgcaactggacgaaggtaccgccaaaggagccaatctggaaaagggaaaagcgttcctgcagaagctctacgacgacctggcgaaacgctaggaaatgagttatattgaatatttataaagtaatataggacaattttctattctttattgtatatttgcgacattaaaaatagatcaataaagtctgatgatacacaccggaattgtccaatatctttcggagatagatacaaatatcttcctgtatttcaatggtatacattcccctttctgggattatttcatgagttctttcacgggtaaattcatctggattcccatgtatgccactatattgtatattttattaaaaaacttccactggaaagtagtaatgtgctacgtggctgccattgcactgactatcacctttgccgaccaaatgtgcagcagcatcatacgtccggtagtagcacgtctgcgtcccgccaatccggagaacccgattgtagatctagtatatatcgtaaatggttaccgcggaggaagctacggtttcccatcgtgccatgccgccaattcattaggtcttgccatgtttgtcatattcctgttccgtaaacgttggctaagcattttcatcctaacctgggcaatactcaactgctacacacgtatatatctgggtgtacattatcccggtgatttactcgtaggaggtattatcggaggattcggcggttggttgttctgcaccatcgcccacaaagcagccatctatctggaaccttccacccgcacgaagagaaaagaaataaaacaatggtcagtcactatttatgtaggattactgactatactcggtatcgttctatattccactattaaaagttggtagaacataacaacactatttcgaactaaaaagtaaaagcctgacaccgttatccgatgccaggcttttacttttttatccgggtttatcaagctttcttgatataatcaacaatccactgtcctacttcttttgttccgtacttagcaccgtcagccacctggatttccggcgtacgtatattctcatccaaagaagcatctacggctttacgaatcaatgcaccctcttctttaaggtcgaaatactcgaacaacatagctacagaaagaatctgtgccaacggattagcaatgttcaatcccttagcctgcggccatgaaccgtgaatcggttcaaataccggagtactttcacctgtagaagcagaaggaagcaagcccatagaaccactgattacagaaccttcgtcagtcaggatgtcaccgaatgtattttccgttaccatcacatcgaagaaagcaggttcctgaatcatcttcattgcagcattatccacaaacatataatcagttgtcacttccggatagttcggagccatttcctgtgcaatctgacgccacagacgggaagaagccaacacatttgccttatctaccacagtcagatgttttctgcgcttcatcgcatattcgaaagccaccttcaaaatacgttcgatttccggacgagtataatagtttgtatcatacgccttatcattatcctggtacttttcaccgaaatacatacctccggtcagctcacggatacagataaaatcggcattctctaccaactccgcacgcaacggagatttgtggatcaggcatttgaatgtctgtaccggacggatattagcgaaaagacccagtttcttacgcatagccagcaagccttgttccggacgtaccttggcagtaggatcattgtcaaatttcggatcacctacggcagagaacaaaacagcatccgcctctttacaaacctgataagttgcttccggaaacggatcgcctactttatcaatcgcatcagctccacagattgcatattcgtaacttactttgtgaccaaacttctcgcaaacggcactcatcacatctacaccttgcacagagatctccggtccgatgccgtcgcctgctaatacagcaattttaaaatccataatcgtttattcttctatttatatattcttataaaaaacattcttcgggcaagttgtttctcacttgctcttctcgtattcatcttcgatgaggttcaacatcttcatagtagccttgatggcagcctctgtctggtcggcatcgagtccgcgggtacggaacacctgctcatcataactccacgtgataactgtctgcacaaatgcatccgtacgtccaccgggagggatggttaccgcataattggtcaacatcgggaatttacgtcctaatgtcaccttatatatcttacgcagcgcacgaacaaaagcatcatactgaccatcgccgcctgaactctcttcatactcttttccgttgatttctatcttcaacgttgccatcggtttcaacccatgagccagattcacaaaatagctcttcagt

SEQ ID NO: 4652 - DNA, 9597 bp, Unknown
  gut microbiota DNA sequence
cataaaggtgaatatccagtctttgacgttggtcagtagcacactttcctttttcttttctgcggttttagagattttcagaactatttcctgatagtatgctgcattagtaacttccgccgatgttgattcgatatctgcgatttttattttcagagtatactcaagcgcttctttggtattttccagatacttccagtctgtgatgctcaaagtaatcggttctgaagctgtagaaccagcttttatcaacagatttttggcagacagattgattttgtttgcatctataccatcacaggtgacactatagtgtacatttatatcttgggtaacagctttttgtgttgtagccataaactgaaactcaacactgccttcaataccttcttcttccacatgctttagtgtaaacgaaggagtcggtctcaaataatctgccggcaataaagaaacatagctcatatcccattcgttgaccgaatcatcatcgctgcaagatgagaagaaagggatcattgcactcatgagtgtaatgattattgattgaaatactttattcatagtaactatattaaaattgtaccatcattttatttccatggagtagcttcatctgtagacagaatcttatctatccacacaggagtgactgttgtggtaatagtatgccctttaccggtagcatcttcaaatacattacctttaccttcattgaatctccaataagcttctaatcccggagattttggacttgtgatagtcatgttgttctgaatctgaatttccgaccggcatacagaccagatacgggcttcacttaccaagattttacatccgctccaccagctaccgccactgaaccaactcatattaccaaatatacaaggcccgccggcaacgtcttttgaacctccgtctttaccgttaatatagatacgatatttagaaccgttgtatgtcacagcaagatgttgccacttattaggttcgaaagagtaggtcggattcagataggtttcatgagtctgaatctgaactaatgagtgagctttgtggtcactattgtcgctttgcggatcttcgaaacgcaataacaagctcttgccgtcgctgccggatgtgctgaatactgcacggttacgattggcagtattgcttacctggaaacgaacttcgacagtaaactcgttgtaggtttcaggagcttcagagaatttctgggctacgagttctgtacttccaacaaattgcggggcggaaaattccatgatactattggcaagaatcaccaagctaccggtaacaggcattacatcaatactaccttgttttgctaccaggcgtacgggtaaagcatatgattcaccggatgcattcatttcctcggagaatgctttgatatgtatggaaatgggatctgcattataagcgcctgctttaatcgtaatattgtccggaagggtgtaatgggtttccggcaatgcgatgtagtttgtaccattagccttgttgtatgcgtcaagagcagcctgatctattgccagactatagctgttgtctttctgttgtgtattgctgatatgcgcgttcagtgtgacattggtttcaccgctgcccataacagtcactttggtgcttgttgcagttaaagcttcttcgaagaagacgtgcgtgtccaatgtactataattcgcatcgtcacagccgatccatgtaccgcctgcgataagcgatatcaataagaagtttcttatgtttttaatctgtttcatagtgaattaatatttaattaacggtttggtagaaggattcataatctggatagctttgcgtagattcttgtattccggatttgtcggatactctgcttccatatgatagcttcctactccgcctttacggaaaccatttttcggttgccagcgtgccattccttccaaagatttcatgctgttgccataacggtcggtataaggatatccgccatccatagcagcatctacagcctcaaagttttcggtcatgatggtcatctttgtgatttgctcttcggacattacgctaccgtaagtctgaacgagtcccggacctgctacaccaccgtctatcagacgtttgtccagattgttgtcattaccgggtttataggcctgaatgataaagtaatcaaagtaagggcctacatcgggtctgttctttatactttgcggttcgccgtcaatgatcaataacttgccggttcccgatttaggaccgaagtgtttgccaagttcgtctacgaatatgaacattctgtcatcgtcgtccacaatgttacctttattaccatagtttggttcgtagtcgatatcgaatccgtcatagccgtatttgttgatcgtatcagcgatagcatttgcatatttgcggatagatgcttcgacggcttctttatcagactcgtccgaaggccagccccagaaatcattaacagcttcctgttggcttgcgaatcccattgactcccaattgtcatatatatgttgtggagtgatctgtgtacctaccgaagtgatgataaagcacatggtgaagcgagttccttttacttcttgacagaacttgagatccttcttttgcgcttctgtaatattcgaccaattcccccagatggaaacgacatccacgctatccgggattcctgccatgctgtttactaatgaagcgccttcgcctgtccagttgccgaaccatccgaaagctttgggatgatcagactttttatatgcgcgcagggctgcatagtattcttctgaaggaccttcgaagtaatcttttgcttctgattctgtccagtcattacagctcacccatattggggtgctcaacgctaacaataaaaaatatagtaaataattctttttcatattaattctagttaggaggttatattaattagtttttccccacgacaaatctgtggcttcattatccggaccaccatttttcagatacgaaacaccttgctgataattggaatggttgttctgtacttccgtgtaagggaatctcagacgacgcataccacgcttgctgtctactcctgatggagacagattgtcgatgcaaggatagagttccggataaccggtacggcgatattcagcccatgcttccagtcccaacggatagttggctatccatttctgagtaatgatacgctgaagattttcttcttcattgttgtcattccatgcaacggcaacggtgttggagatggtatatgcatggcctctgggatcattattatgtgatactgtcggtttttcggtatttgtcagataattgtcaggcattgttgtgccgtactgttccatggagagtttgattccttcttcatagtactctttagccgatttattgccgacagaccagttcttcagtttgccttccgcacggaggaatgctgtttcagcagcgcagaatactaatagctttgaagttcctgtgatggccggtatggaataacctgcaacgtcacttttggcaaaaccatcttctccggagcgcatgcccacatattcctgagtgtgaccagtgaatgttgaatggttgaagtatttagacatacgcggatcaccgtatccgttcatataatcaacgatattggcattgacacgcaaatcaccccagcttacagctgccaattggtaagggtttgtctgcgagccgcaatccatcatggcattgtcattatttgcttcgatcagtccggcttcatgagatgcggcagcttccgcattttcttttgccatctccggatatgctgtactgatgcggatagccaccctcagtcgcatggaatttgcgagtcttgcccagttggcataattgccgctgaatacagggtcgttgctggcgagcggtgcgttaccattggtatctttgtaatagttatagagtacgttggcagcgcttgcaaaatcttccattatattcttatagacttgttcttctgtgtcataagctacatagaagttaccttttttcacttgactgtagggcatcggaccgtaacaatcggcaacacgcagcatggttatggcccgtatcatacgtgcaaaagcataatagtgcccgctttcattagttgcttcctgtatctggaagaaattaccgtatattttctcgaaattagtattccagggacctgcattccaggcatcactttgattgaatgtgccgaagttagtgccgctccatacattcgcacatgtcagatagcctcctaactgaccgaccatctgatccatcatctgcgagtcattctgttgaatgtttacgatcgtctcaatcattgacttcatcaaagtagaagggtcagcttcatgaatctggaattgattggtgttgtattcttcaaaattaccagtacaactcccggcaactaataccaaagcagtaccgactgttatatttcttagatatttcttcataataattttctcattaatttagaattgtacttttacattaaatcctatattgcgcatgctcggttgcatgaagtagtccacattcatatagtaattactggatgtagaagcagacaattcagggtcaaacggtgctttgcaatagatcatccacaggttgcgtcctacaagcccgaaggttacattggctacattgttcagccatttcttgggaagtgtatagctaagactgagttcctgaagacggacattggtggcactgtataaatagtatcttccgtaaccgccttcaccggtaccgatggtctgatagtatttctgtgtatccacttttccgttattcgttggtacacctttattgtcacgtgcatttgccgtgatacttgatacaccatagtagtccagaacaccttgcgtggctgagtatgccagaccacctacacgtgcggaaagtacgactcccagattgattcctttgtaagtgaaattgttggtccagcctaaattatagttagcgttcaaatttccgactttggtaggagtctctgccgtatgcatactaagtcctccggtttgagcatccacttttatatttccgttattatctttggttaattcattgtacacgtatatgtcggtcattgtacctccttctgtcaagattactcggggagctacattctctttaccaagccatcctacaggcatgtttggcatatcaatcagttcgcccgttacagggttggtgctaccgcctgccagacgttttaccttgttgcggttcagagtgaaagtagcatttgatgcccatctgaatcctgcccattcgtcggtgaagccgagcgccagttcgattccctggttttgtacattaccagtctgaacgattgccttattatatccggaggaagagggaatatctactttaaatgtctggtttaaagtattggaacgataataggttgcgtccagattgaagcggttttcccagaacttcaagttcagaccgatttcccatgatttggttttctccggtttcagattgtccatcgggtaaactgtcgggtttgcccagttgtgagtctggctgttatattcatatcccgggttagtcaggtagcggtcgaaagaagaggctacaactgtgtaagaaccacgtacttttgcataagatatgattttaggcagagcgaacatttccgtcagtacagccgataagccgacagaagggtagaaatatgaagactgattggagaaagccagtttggaatcccagtcattacgtccggtcaacgtgaggtaaagttgacttctccatcctaattcgacattagcgaatatactttgtacttcgtcatcgtatccgtccggtagtggtttatagtttgcagcgtaattaatattattcagtgcaaagaagttaggtataatcaggtcaccagcaaagccgattgtctgcatggaagtgtgataaagtgacatacctatattggtattcagacggaaatctccgaatgttttatcaacagtagccattaaatcggtatataaagaacgttcctgacgcatagcatcttcaaaaccaccattgacagagcagaaagtggcaagtgttgaagcgtatttttctgttttgttacgataatccgagttgtccaaattgacacgtccggtgatatttaaccagtctgtaactttccatttcagagaggcattcagcatatagcgttttttgtcagaggtacgtctgatgcggttttgagtccagtaaggattctgcaaagacagtccgccgtcgccataaggccagtattgtttcataaatccgtaatttgtatcgtaacgttcgtacaggcggatttcatcaaaattatctccgcgtggaaacagatacaaagcgggtaggggattgtaatattgtccctgagataccatattggtattattctgtatgatatattgcgcaccgatatccagtgtcagcttatcattcaggaagttagttgtattgcgtgcggtaaagttatagcggttgtagctgttatttggtaaaataccatctgaatttgtcgtggaagctgagaagtaagtctgatttttatcgcttcctgtcgataatgtaatggagtttataatattactaccggtattgaagaagtctttcggatcatatcttttatctgtcagatctccccagctgaacaagcctgaacttgttccgtatctgttctgcatctcaggcataatatatgccttggagaaggtcgtactattggaaacagtaagtgatatcttttcttttttccctttctttgtgttaaccaggactactccattggctgcggcagagccataaagggcagcagctgacggtccggtcatcatacttatactttctatatcgtccgggtttaagtctgctactgcatcagaaccacccattgatccgtactgaccgtcaccaccacttgaacctgtgttaaacataggtacaccgtcaatcacatataaagcattgttattcttggtcaatgacttcataccacgcattacaacacgtgtagcaccaccggcacctgtagcaccgctgcttatctgcacaccggctactttacctgcaagcgaattgataaagttggcatctttcaccgctgttaaagcttctccctttacttgctgtacattataactcaacgctttttgttcacgtttgatacccaacgcagtaactactacttcgtccaaggtttgcgtgtcttcacccattgtgacttttaggggttgggcgttggcaagcgtgattgattgggaggcataaccgatataggagatttctaacacatcacctttggcagcttgtattttgaaatttccatccatatcagtaatcgcaccagtagctgttcctttcaccagaatgctaactccaattaaaggttcaccttgtgcatctgttactgttcccgttgcaacgattggtgtttttttctgttgttctacttctttcttagtagaaagtacaatatgcttatcgactattgaataactgatatttgttcctttaaacagctgacccataacgttagtcagcgactctttagaaactttaatagatatgacacgattaatatcgacgtcatttgtgttgtatactactgacattgaagtttgtttctctatctctttcaatgcagtatttagaggtaccttcgatagattaagggtaatcattcgttcctgcccataagctgaggcaaaactcgaaaacaataaaaggaaaaataacaagtatggaaacttgtgttttataatttctttcatcttattctttttaattagaaatagtttttaggtagttaacaaacatgtgcgggtaataaatataaccgccactcatacaaaggatctatgtatctctgtttctcatatttataaatttaaaggttacactaaaaatgatttttcataagcgcttattcatcagtaatacatttgatactgcaaccatactaaacgaaaataagattttttttcgtaaaaaatggttagactaagcatttttttgaaaaataaatacataatcatttgataaatagagcattaagtagttctgaaaaactattcaatttattacatttgcatgcaatttgcatatattcaaataacagatagatataaagaatcattttatgttcaaatattcaaaagatggagtttctgtattgaccatattagacaccagaagggctaaaattaatggattatttccagttaaagttcaagtcgtatttaggagaaagcagaaatattattctacggggaaagaattgtcaaaagaagactgggatagattgttaaaggcaaaaagtcagttattaatggaggtaaggactgatatcgaaagtagtttttctattataaaacaacaagttagcgaacttatccaaaaaggagaatttagttttgaaatattgagtatcagacttggaaggcatacgaaagaaatcaatctgcgtacagctttcgaattaaagatgaaggaattagaggataatgagcaggcaagtacatatttaaattatcgaagtgctttgaagagtttagaatgttttggtggtaccaatattccattagacagaattactgtggagtggctgaagcactgtgagcggttttggatttctaacggtaagagctattcaagtgtgagtatttattttcgaaccttaaagtgcatattaaaccgtgcagtacgagatggaatactgaaagaatcatcatttccttttggaaagaataaatatgaaataccagaaggacatggtcgaaagctggctctcactcttcctgagataaaaagagtcatgtctttccaggattctaccaatgaattagaggaatttcgtgatttatggttcttctcttatttatgtaatggaattaattttatggatctgttatttctccagtactcaaatattgtagatggagaaatctgttttatacgttctaaaacatccaggactactaaacatagtaaagaaatacgtgctactataactcctgagatgtgggatatcattcataagtggggaaaccctaatataagcccacaaacctatatttttaaatatgccaaagggaatgaagatgcttttgaaaagatcaaattagtgcgtcgtatcgttactaaatgtaatagaaaattaaaaaaaatagcccaaggtacaggtattgctcaactgactacttatacagcaagacattcatttgcgacagtactaaaacgtggtggagccaaaacgtcttatatttcagaaagtcttggtcactctaatttaactgttactgagaattatttagcatgttttgaaaaggaagagaggattagaaatgctcgactactgactaatttcgataataaaatgtaaatttgaatggtgcatgcaaattgtatgcacaacgctactttttgtgtttattgcataggcataaaataaatgagtatacgataatatgatgaattatagaaaaatctcattgtgtctaatatcattacaagatatgattaaccatatggttaatcatatcttgtaatgtcgcattttataaataatag

SEQ ID NO: 4653 - DNA, 9812 bp, Unknown
  gut microbiota DNA sequence
acagttgacggtccttctatgaaagactggagaggtggtcgtgctgcttctggcaacatcatcccttcttctacaggtgctgctaaagctgtaggtaaagtaatcccggctttgaacggtaaactgactggtatgtctatgcgcgttcctactttggacgtttctgtagttgacttgactgttaacttggctaaaccggctacttacgctgaaatctgcgctgctatgaaagaagcttctgaaggcgaattgaagggtattctgggttacactgaagatgcagtagtttcttctgacttcttgggtgacactcgtacttctatcttcgatgctaaagctggtatcgctttgactgacactttcgtaaaagttgtatcttggtatgacaacgaaatcggttactctaacaaagttcttgacttgatcgctcacatggcatcagttaacgcttaattagaaatctaaacatataggaaaccgctgcggaaaaccgtagcggtttttttgtcttcattttatatattgttaaaaagcaaggtattatccgtggtataacctacaattttagtagttttgtacttctatgaagagaattatgaagagattattaataacattgatactagtttacaccatgaacaatatactgaacgctcagaatcctttcttcggtcagtatcagacaccgcatgggactgtgccctttgaccggatcaagacagagcattatgagcctgccatcctcgaaggaatcaaacaacagaatgcggaacttgatgcgatcatacaaaacccggagaaggcgacatttacaaatacaatagaagcctacgaacaatccggaaggctgctggacaaagtaactgccgtattcggcaatatgcttagtgctgaaaccaatgacgacttacaggcattggctcagaaaatcatgccactactcagcgaacacagcaacaacatcacactgaatgagaagttgtttgcccgcgtgaaagaagtgtacggacaaaaacaatctctgcaactgacccaggaacagaatcgcctgctagacgatatatacgacagttttgtacgccacggtgccaacctcgaaggagaagcccgtgaacaataccgacaactgaccaacgaactgagcaaactgacactcgacttcagcgaaaacaacctgaaggagacaaacaggtatcaaatgcttctgacagacaaagccagcattgccggactgccggaaatcatcgtagaagctgctgccgaaacagccagaagtgaggataaagaaggatgggctttcaccctgcacgctccaagttatgtgcctttcatgacttatgccgacaaccgcgagttgcgccataagctctacatcgcatataatacaaagtgtacacacgataacgaattcaacaatatcgaaatcgtaaagaagctggttaatacacgcatgaaaatagcccagctactaggatataaagattatgcggaatataccctcaaaaaacgaatggctgaaaacagcgatgccgtatataagctgctcaaccaactattggaagcctacactcccaccgcacagaaagaatatctcgaagtacaggaactggcacgtgaggaacaaggtgatgacttcattgtcatgccctgggactggagctactattccaataagctgaaaaacaagaaattcaatatcaatgaagaaatgctccgtccttacttcgaactggaacaagtaaaaaaaggagtattcggactggcagaaagactctacggaatcactttccggaaaaatacggaaatcccggtttatcacaaagatgttgaagcctacgaggtattcgacaaagacggtaagttcctgtccgtactgtacactgacttccatccccgtcccggaaaacgcgccggagcctggatgaccagttacaaggaacaatggatagatcccgtaaccggtgaagacagccgaccgcatatatctgtagtgatgaacttcaccaagccaaccgaaagcaaacctgctttgctgactttcaacgaagtggagacattcctgcatgagttcgggcacagcctgcatggcatgtttgccaactcaacctatcagagcctaagcggaacaaacgtatattgggactttgtggaacttccttcacagatcatggaaaactttgccatcgagaaagaatttctcaatacctttgcccgtcattatgaaaccggagaagtgcttccggacgaactgatacagagactcgtggatgcttcgaacttcaatgcagcctatgcctgcctgagacaagtgagcttcggtctgctcgatatggcatggtacacccgcaacactccttttgagggcgatgtaaaagcctatgagcaggaagcctggaaagacgcacaagtattgccgatagtcaaagaagcctgcatgagtacacaattctcccatatctttgccggaggatattccgcaggatattacagttataaatgggcagaagtgctggatgcggatgcgttctcactgttcaaacagcaaggaatcttcaaccgtgaagtagcagattcgttccgcaacaatatcctgtcgaaaggaggtacagaacacccgatgttgctctacaagcgcttccgcgggcaggagcctaccattgacgcattgctgatccgaaacggcataaagaaacaatacaattaaaaaaggagagaattggacatgaagaagagattgatacttaaagtattaggattgctgttattgcttccgatgttttccggatgtaatgatacggatgatgtagccggcatcttcaccggcaagacatggaaactgacttatatcacagtcaaagatagccatcaaatgtttaatttttggggaaacgacaacaaagcccgcgaacaaagcatgaaattgcttgacgaaacaggtaggtatgtaattacctttaatggaatggaagaaagcaatatcatcaccgggaccttaagtggcacagtgataacctctactttcactggatcatggtctgccaatggaaaggacaaccaattcaatgcatctatccaaggaggtaatgaatcatcagatatattagcaaagaattttatagaagggctgaacaacgcaacctcttacggaggagatgagcgaaatctatacctttactataaaccttccggtagccagcagacactttctttagtttttcacgttgtaaaataaaagacactctcatggacacggaaaagaaacaattggaactggacaaacgttacatacgtatggcaagcatctgggcggaaaactcttattgccaacgccgtaaggtaggagcgttgatcgtcaaagacaaaatgattatctccgacggatacaatggtactccttcgggcttcgaaaacgtatgcgaggacgagaataacctgacaaaaccttatgttctccatgcggaagcaaacgctatcaccaagatagcacgctcgaacaacagcagcgacggtgccacgatgtacgtcaccgcctcaccttgtatcgaatgtgcaaagttaatcatacaggcaggaatcaaacgggtagtctactccgaacattaccgcctcgaagatggaatagaactattaaaacgggcaggaatcgaagttatctatacagaaatgaacgaagattcttctccaaacaaataataaaacgaacgttttaaaaaaaggaatagacatgagtacaagaaactcttcacgttttacgcctatcatcatagctatcagcgtggtggccggtattcttatcggtacattttatgccaagcacttcgccggcaaccgtctgggtatcatcaacggttcttccaacaagctgaatgcgctgttgagaatcgtagatgatcaatatgtagacaccgtaaacatgaccgacctcgtggagaaggctatgccacagatcctggcagaactggacccgcactccacttacatccctgcacagaatctcgaagaagtcaattcggaactggaaggcagtttcagcggaatcggtatccagtttacgatacagaatgatacgattcatgtgaatgccgttatccagggaggcccatctgaaaaagtgggactcatggcgggcgaccgcatcgttaatgtagacgacagtttatttgtaggcaaaaagctgaacaacgaactagccatgcgcacactgaaaggtcctaagggatcgcaggtgaaactgggtgtcaaacgcgtaggagaaccgaaattgctggacttcaccatcacccgcggagacattcctcaaaatacagtagacgctgcctatatgctgaacgatgatatcggttatgtaaaagtcagcaaattcggacggacaagccacgtagaattgcttaacgccttggcccagctcaatcataagaaatgtaaaggactgattattgaccttcgcggcaatacaggaggatacatggaagctaccatccgcatggtgaatgaattcctgcccgaaggtaaactgattgtatatacacaaggacgtaaatatccccgtgcggaagaatttgccaacggtacgggcagttgccagaaaatgccactcgttgtattgattgacgagggttctgcttctgccagcgaaatctttaccggagcaattcaggataatgaccgcggtacagtggtaggacgccgttccttcggaaaaggactggtacaacaaccgattgacttcagcgacggctctgctatccgcctgactatcgcccgctattatactccttcagggcgttgcatccaacgtccttacgaaagtggtaaagacaagaattatgaactagacatatacaaccgctacgaacacggtgagttcttctcacgcgacagcatcaagctgaacgaaaacgaacgctatctcaccagcctgggacgcactgtttatggtggtggcggtatcatgccggacgtatttgtaccacaagatactaccggagtcacttcttatctctcatcagtaatcaaccgcggactaactcttcagtttactttccagtacacggacaataatcggaagaagctgagccagtatgaaacggaagaagacctgctgaattatcttcgtcaccaaggtttggtagagcagttcatccgctttgccgactcgaaaggtgtaaagagaaggaatattctgatccagaaatcgtataaacgactggaagcgaatatatacggcaacattatctataatatgctgggactggaagcttatctgaaatacttcaataaatcggatgctacagttcaacaaggtatagaactgctcgaaaaaggagaagctttcccaaaagcacccgccgagacagaagaggaagtgacgaaagacaataaagatggaaagaaaaaaagaactgcgcaagcttatggcatcactgaagatccgacacgcatcttcgactttgcagaagctacaatcagctaaaatacttgccgccctcgaagcccacccggctttcagggcggcaactactgtattgctctaccattcgctcaaagatgaagtagacacgcatgcgtttatccggaaatggagcaatgagaagcggatattgcttccggtagttgtcggtgatgaattggaattacgcctctataccggtcccgaggatatggcaaccggcacttacggcatcgaagagcctgttggagaaacattcacagactatgcagacatagactttattgccgttcccggtgtagctttcgaccggaaaggaaaccggctgggaaggggaaaaggctattatgaccgtttgctgccacgtatccccgcagcttataaagcaggcatctgcttcccatttcaaatagtagaagaagttccggcagaagcattcgacatctgcatggacataattataacaagtaatgaggacgaattatcacacccacaccacccgctgcctccatgcgacagggagtgacgaagaatttgttttaagcgccatcaaaggcggctatcaggaacttggtttctctgaccacacaccatgggaataccataccgattatgtatccgacatccggatgactcccgaagaactgccggagtatgtagaaagcctccgctcgctacaaaagaaatataaagatcaaatcagcattaaaatcggcttggaatgtgaatattttccggagtatattccctagctgaaaggggttatcaaggagtatcaactggattacatcatcttcggcaaccaccatttccatacagatgagaagtttccttatttcgggcgaaatacccatacggtagatatgcttgaactttatgaagagagtgcgattgaagggatggaaagcggcttgtttgcctatctggcacatcccgacctgttcatgcgttcatatcctgaattcgaccgtcattgtaaacttgtcagcagacacatctgccggacagcagcccgcttgaacctgcccctggaatataatataggttacgaagactacaacgatgaacatggaataacaaccattccccaccctgctttttgggaaatagcagcacacgaaggctgcaccgccattatcggagtggatgcccacaacaaccaatatcttgaaactccgttctactatgaccgggcaaatgagactctccaaaagctggggatgaaagtgacagacagaattcctttcctcaacgaaaaataatgtttgtgataaccgtagcccctactctctgattcagagtacgcaccagaagttcccgtcccatcatcagttcctgacgaagggcggcggaagtgagatgtacatacagcgtctggttacggatatagagattactggtatagcttgccgccggtcccaacacctgcggccaggcatccagcaaccgctgctcattgagaggagactccagactctcctgacgcaggtattgctgaatcagttttcctatctgctcggcatcgttacgtttcattgttcagctcccatttcattaattacaccctgatctacgcgaaatactttataatcgctgcctaccttctgcagaatacgatccagatgttcacggttagtatccgtaataaatatctgtccgaagttatcaccagccaccagcttgacaatctgctctacccgcgaagcatccagtttatcaaaaatatcatccaacagcaataaagggacggtctgccccgtacgtttcaagaagtcgaactgtgccagcttcaacgctaccagatacgttttattctgtccctgcgaaccttccttcttgatcggaaagtcgcccaacagcatattcagttcatctttatgaattccccgcaaagagaatcccataatcttatcccgttcccggctttgcttcagaacttccagtaaagaagcatcccgtgcatgcgaatcataagacagacccacctgttctttatcctgggaaataaaagaataaaacgactggaaaataggaataaactcttcgataaacgcctcccgcttgcgaaaaacaatttcacccgcttgcgccatcatctcctcccaaaccaggaacaattcctcttctaccggaaattcactttttaataaggtattacgctgtgccaatgccttattatagcgtatcaatgcttccagatattccttatcatactgagagatcacgacgtccataaagcggcgccgttcgtcacttcctccggctatcaactccgaatcggcaggcgaaaccatcactaacggcagaaagccgatatgatcggaaaagcggctatactcctttttattccgtttgaattgctttttcgaacgacgcttcattccgcagtaaatctcctctggtgtgccatcttccgcctcataaaagccctgaataacaaagaaatcctgttcgtgccgaatgttctgcgaatcaatcggattacccgaactcttgcagaaagataaaaagtacactgcatccagcagattcgtctttcccatcccgttctgtccgaagaaacaattcagtttggcggagaatccgatctctacctgttccagattcttatagtttaatatggatatccgtttcagtatcattgtatacgcgttaatttgttcacaaaagtagcaagtttttcgaggttttcgagcgtaaaacaaaaaaagatgcctctaaatttcgtttgtagatataaaaaaactacttttgcgagtcgaattatcaaacgatgaataataacaaaaagaatcatataaaaatggcagaacaaaagaatcagaacgaacatctgaacgtagaagatgcactgacacaatcggaagcatttcttgttaagtacaaaaacgcaatcatcggcggtgttgtagccgtgattatcatcgtagcaggttttatcatgtacaagaacctctatgctgagccacgtgaagaaaaggcacaggctgctcttttcaaaggacaggaatactttgaacaagatgcttatgaacaagcactgaacggtgatagtattggttatgtaggtttcctcaaagttgccgacgaatatagcggaacaaaagccgctaatctggcaaaagcatatgcaggaatctgctacgcacaactgggtaaatatgacgaagcagtaaagatgctcgacggcttcaacggaggcgaccagatggtagctcccgctatcctcggcgcaacaggaaactgctacgcacaactgggtcagctggacaaagccgcttctaccctgctctctgcagcagacaaagctgacaataactcattaagccctatcttcctgatgcaagccggtgaaattctggtgaaacaaggaaagtatgatgatgccgttaatgcctacactaagatcaaggacaaatacttccagtcttaccaggctatggacatcgacaagtacatcgaacaggctaaattgatgaagaaataatataccttattatatataatataaggttaggcacggattacacggatttcacggtttttagtacgcacaatatgtactaatgcaattatgcgaagctaccgtgaaatccgtgtaatccgtacctttttaaaatcatgtatttataacccactttaattactacaattatggcaacagcataccataacttatccgaatacgatttcaactctgtaccaaacgctgaaaacatgaaattcggcatcgtcgtatccgaatggaatttcaatattaccggagccttattgaacggcgcagtcaatacattaaaaaaacatggagtgaaagatgaaaatattctggtaaaaactgtaccgggaagtttcgaactaactttcggcgccaatcaaatgatggaaaattgcgatgtggatgcaattattgcaatcggttgtgtaattaaaggagatactccacattttgattatgtttgtatgggagcgactcaaggaattaccgaattaaacgcaactggcgacataccagtcatttacggattaattaccaccaatacaatggagcaagcagaggatcgtgccggtggcaaactgggtaacaaaggagatgaatgtgcaatttctgcaataaaaatgatcgattttgtttggagtttaaataaatagttgtatctttgcaccgcaattgagaaacaaacctcctcaaaagcacaaaagggcaaataccagagtggccaaatggggcagactgtaaatctgctggcttacgccttcggtggttcgaatccatctttgcccacaaaaattgcggaagtagctcagttgatagagcattagccttccaagctgagggtcgcgggtttgagccccgtcttccgct

SEQ ID NO: 4654 - DNA, 11499 bp, Unknown
  gut microbiota DNA sequence
atggtgattcctgctaaagcagcggctcccgttttaagaaattttcttcttgaaaagtctgacatggttttatttttaagagttaataattgatttcagtttcttgttttattgaatgttcgttatggttttcggagtaatccgtatccatttttcatatttcttcttctttcccatatttgctcaagtgttttcaattcaccgatggcaggaaggtcatgcgtgcgggcatcgtgcaaaaaggtccatgcatattccgatgcgatggctgaatcacgtatgagcggtagtttgggatttctgattccggtctctatggagtcggcgaataagtcgcacagcacatcgatgttttttccaccgaacggcttctctatatgatgggtctgtgtcactccacgcagatcgacgacagctgtcttgaagtcatgtgtcattcgggcgatacctttggtaccgatgatatccacgtatgagttatgagtctgatctttggataattgtccgtacacaaacccctgagtgatatcaaaaacaacaccgttctggaatgtcccgtgacactgtacccaccaagggtctttataactccacatattgacgccctgtgcatgccatgtcttgtattcgcatccggcataccagcgtgcaatgtctacataatgcattccgcagtcatggaaggcggggccttcatattcgtgaccttcgcccggtgcgagacccggagtcatgtggcagattcgcagaatggcaagttcgccgatctcgccctgattgataaactgtttgatagcctgatgataccaggcgttgcggagatacaaattgacggttgaaaaacaactggctttctccgtgatgtccactactttccattctttgtctatggtgtctgataccggtttctcggagatgatatgtttcccgtatttgatagccttttcaatccggtcaagccttgagtctgccaacgcgaagagtcccactacctgcacactttcatcatcgaacatttcctgttcgttttcgagtattttcgattcgggagataattgctttgccaattcgcggcagtcgggattaatgtcgcaaatgtatgcgacttcccatcttccgcttttctgcatttctttcaaataaaatcgtcccattcgaccgaatccaataagaccaactttaattttcatcgtatatcttttttagtttctttatcccattatatactttgccttgtgaggcatcagcttatatagtagtgcggtgaatgcccagctgcaaaggaaaatacaaactgccatcaacggaacctgcaacggaattggaatttccgaaggacctatcagcagaaagaacggacctactacaaagtagtgtaccatataaattccaaaaccgcatttggtcatgttggctaatgctttgacgatgacaggtgtattgattactactttctgcaacatcaggaacatggctaaagtcatcagcaacacgttcggactacagaatgtgaagtaaagttccatctcagtctccgtagcattcgggttggcggcagttgtgctgaaccctgtgtacgtcacataatatccaatggcaaacatcacggcacaaatgaggaatgtcttccaaacactccaatcattagtaagacgatcatcttttggcgaaccactaaaaggccagaaaatttttagtgcatttccgttgccgccttctttcagataatgtcccaacagcaggtagccgttgaatccggcaaagtagtagaacatactgaactcgttccacgtgtcagtgccgaatacatagccgctccggtcgaaaagcatattggctacatattcgcggatatacgggataaacagggaaacaatccagatgaaaaggaatatttgtttggttttattgcttgcccgctctacccatgcagagaagaaaggcatataaagatacaatccgatgagcagatagatataccacatatggttttccttatggctgaagttgaacggtatcatggccacatctttcagagaatcgatgaggctttgcgactcatgtccctgagtatagcagaagaagtcgccgatgatttctttgggcagccccagcagccccgtgaaccaggggaacatactataaagtaccgaccagatgaggaacgggaaaagtacgcggaagatgcgcttcttataaaaagtgcctaaaggctgttgcctgaccggtagcagcagtaatccggtcatcattacgaataagggaaccgaagggcggagaagcgaaccgtagatggctgcccaatgtgtgtactcgggaataacgcgcatcgtaggagaaatgtaaaaagggtcaatgcaatgtacgccgattaccattagcatggcgacgcaacggacaacatccagccagaccatccggttgtccgcaatagagttttgagtcatgatattttgtttttaagttatgtaggcaaagttagcgaactgtggaagcaaccatcattaaaaactgatcattttagaacaatctctgaccatttcaagtataaatgcttatttttgcatgtggtaatgtctttttatacagaaaacttatgctgaaaatattagtaacgtatgccgttcaaggcgaatttgtagagataaagtggcccgatgtagagccttattacatccgtacggggatcggaaaagtgaagtccgcctttcatctggcagaagcgatccgccaggtgcagcccgatctcgttttgaatctcggaagtgcaggaacagtcaatcatcaggtaggggatatctttgtctgccgcaaatttatagaccgcgatatgcagaaactagccggactaggtttggaatgcgaaatagattcttccgctttgcttgaaacaaaaggcttctgcaagcattggacggaagagggaatctgtaatacgggagatggtttcctgacggagctgactcacgtaagcggagatgtcgtcgacatggaggcgtatgcgcaagccttcgtctgccgttccaaagagattccttttgtttctgtgaagtacgtgaccgacattatcggacaaaactccgtgaaacattgggaggacaaacttgccgacgcccgtcagggactttcgaactatttcaatgtcttgaaagaaagaatatgataggtgactcctgccgctatcagtcccagaaggattttcacccatagaagtggaatcaggaagaagatgcaatagagcatcgttccccacatcagcacaagggagataatcttggcgcggagcggtattgccttgttttcccggaaattgcggatatatggaccgaagtgccggtgattcagcaaccagttatataatcgtggcgaccctttgaaataaagcgcggcggtcagtaacagaaaaggggtagtgggcagtaacggcagaaagatgccgagaatgccgagtccgagagatatgcttcctaaaacaatataaagagttttcattcggcaaagatagtgtaaaaacaggaaaaaataatcgggtttgctggatgaaagctctttttatattacctttgtccttgcatcgaggtgacattagatgcatgtaactataataaatacatacagccatgtttacagtaatcaaacgcatggagatatcagcttctcacaaactggtactcccgtatcgcagtaaatgcgccagtctacacggtcacaactggattatcactgtctattgccgttcctcacggctcaactccgaaggaatggtggtggattttacccgaatcaaagaagtggtcacggagaaactggaccatcagaatctgaatgaagtacttccatttaatccgacagcagaaaacattgcccgatgggtttgcaagcagattccgcaatgttataaagtagaagtgcaggagtccgaaggaaacattgtcatctacgagaaagatgctgcggcaaacgagaaaactccggcagcaggagagacagaatagacaatagaaatttaagaacaactcaaatgatgagaaagattaatgaaatcttttacagtctacagggtgaaggctatcacacaggtactccggcagtcttcatccgtttctccggatgcaacctgaaatgcagcttttgcgacacacaacacgaagcaggcaccttgatgactgacgacgaaatcatagccgaagtcagcaaatatcccgccgttaccgttatcctcactgggggagaaccttcgctctggatagacgacgcactgatcgaccgtctgcacgaagcgggtaaatatgtttgtatcgaaaccaacggcacacgaccgctgccggagtccgtcgactgggtgacctgttcgcccaagcagggtgtcaaattagggattacccggatggatgaagtgaaagttgtctacgaagggcaagatataagtatttatgaactgcttcccgctgaacattttttcctccagccttgttcttgtaataacactgctttgacagtggactgtgtaatgcgacatcctaaatggagactaagcctgcaaacgcacaaactaatcgacatccggtaagcagataaaacggatgtagtagcagaggatgcatctaaattttacgtaatataattatgaaagtaggtttatttattccttgttatatcaatgctatttatcccaatgtgggggtagcgtcgtataaactattgaaaagtttaggagtagatgtcgattatccgttggatcagacctgttgcggacaaccgatggcgaatgccggttttgaagatgaatcgatgaagctggcgctccgttttgacgatctgttccgggagtacgattacattgtcggcccttccgccagttgtgtggcatttgtgaaagagaatcatcccggtatccttgaaaaagaagggcatgtctgtcggagtgcggggaagatttatgatatctgcgagtttatccatgatgtgcttaaaccgacgaagatacccgcacgcttcccgcataaagtcagcatccacaacagttgccacggtgtgcgtgaactcttgatttccgctcccagcgagttaaatatcccttattacaataaattgcgcgatctgctcgatatggtcgaaggcatcgaagttttcgagcccagccatatagacgaatgttgtgggtttggcggtatgtttgccgtagaagagcaggcggtatccgtttgcatggggcgtgataaggtgaaagaccacatggctaccggagccgaatacattgtcggagcggacagttcctgcctgatgcacatgcaaggtgtgatcaaacgggagcatctgccgattcaaattatccatattgtagaaatattagcgtcgcaatcatgagtaccaaacattcaaaggctgccgaaaagttcttgcaggacagcaagatggcagcatggcataacgaaaccctttggatggtccgagccaaaagggacaagatgagcaaggaagttcccgaatgggaagagcttcgcaacaaggcctgtgaactgaaactgtattccaacagccacctcgaagagctcttgcaagagtttgaaaagaacgcgactgccaacggagcgattgtgcactgggcaaaagatgcggacgaatattgtgccattgtgtacgaaatactgaatgagcataatgtacatcatttcatcaagagcaagtcgatgcttgccgaagagtgcgggttgaatcccttcttgatggaacgcggaatagacgtggtagagtccgacttgggtgaacgtattctgcaattgatgcatctcgaacctagccatatcgttcttcctgctatccacatcaaacgggaacaagtgggagaactgtttgaaaaggaaatggagacggaaaaaggaaacttcgacccgacctaccttactcatgccgcacgcaagaacctgcgtcatctctttctgaatgcggaagccgccatgacgggcgccaactttgccgtagcctctaccggagacattgtagtctgcaccaatgaagggaatgccgatatgggtacttcttatcccaaactgaatatagccgctttcggcatggagaagatcgtgccggatctggatgcgctgggtgtgttcacccgtctgctggcacgttcggcaaccggacagccggtgactacctatacctctcattaccgccgtcctcgtgaaggtggcgaatatcatattattattgtggataacggccggagtaccctgctctccaagcccgaccatatcaagacattaaactgtatccgttgtggtgcctgcatgaatacctgtccggtctatcgccggagtggaggatactcctacacttactttatacccggccctatcggtatcaatctggggatggctcatgatccggagaagtattatgataatctttccgcctgctctttgtgtatgtcctgttccgatgtctgtccggtaaaagtggatttggcagaacagatttacaagtggcgtcaggatttggacggattgggaaaggcgaataccggaaagaagataatgtccggtggcatgaagttcctgatggaacgtcctgcattgttcaatgcggctctgtgggcggctccgatggtgaacagtctgccacgctttatgaaatacaatgactttgacgattggggcaaaggacgcgaactgccggaatttgccaaagagtcattcaacgaaatgtggaagaaaaatgaggtacagggaaaggaggaatcaaaatgagcagcagagaagaaatattggcgagtatccgcaagcatacgcagacacgctacgaaaagccggatatagcggatatgaaacgtttgacgtatccggacaaaatagagcaattttgcgctatcagccgggcggtaggtggtacggcagtggtattgggcgaaggcgaagatgtgaatgccgtcattcgccggacgtatccggatgcgatgcgcattgcttccgtattgccggatatatcttgcgcaactttcaatccggatatggtggacgacccgaaagaactggacggaaccgaggtagccgttattcggggagagatcggagtagcggagaacggcgctgtctggataccgcaaaccgtgaagtacaaagcgatttattttatttcggagaaactggtgattctgatcgaccggaataaaattgtggataccatgtacgacgcttatcgcaaactggacggacaggaatatcagttcgggacctttatttccggcccgtcaaagacggcggacatcgaacaggcattggtcatgggagcgcatggagcacgggaagttttggtcatattgacgtaactccgctttattactctaaaataaatttggatttaaaacaatagaagcttaggggcagattaaaaagtcggtagtatccacattctcctccttctggaaggaggagtggtcgaagaccgaggtggtaggcgaatacataaattaataataatgaatatgttatatgcttacctaccacctccccctacgggtactcctccttcccgaaggaggagaatagagatagtaccgactttttaggcagtctcactataatcgtctaaataataaaaacagtatgtatgcaaataaagtaaagaagatagctgccgttcatgacctttcggggatgggacgtgtttctctgacagtcgttattcctatcttatcctctatgggttttcaggtttgtccgcttcctacggcggtattgtccaaccatacgcagtatcccggcttctcctttctggacctgacggatgaaatgccgaagatcatagccgaatggaagaagctggaagttcagtttgacgctatttataccggttatctgggttccccgcggcagattcagattgtttccaatttcatcaaggatttccgtcagccggatagtctgatagtagccgatccggtgctgggtgataacggccggctttataccaactttgatatggagatggtgaaagaaatgcgtcatctgataaccaaagcggatgtgatcacaccgaatctgacagaactgttttatttgctggacgaaccgtataaagcggatagtacggatgaggaactgaaagaatatctccgtctcctgtccgacaaaggtccgcaggtggttattatcaccagtgttccggtgcacgatgagcctcataagacttccgtatatgcctataatcgtcagggaaaccgctactggaaagtgacttgcccttatctgcctgcccactatccgggcacaggggatacattcacaagtgtgatcaccggctccttgatgcagggagacagtcttccgatggcgttggaccgtgctacccagtttattctgcaaggaattcgggcaactttcggctatgagtatgacaaccgggaaggtattctgctggaaaaagtgcttcataatctggatatgccgatacaaatggcaagctatgagttgatataattaatatttataaacttttgtacttcagatatttctactatttttactgcctaattagtaatcatgaataaacatatctgatgactcaaacacttaaaacgactgaacggctcggagtagtagatgctctgcgcggatttgccctgctggctattgtattgttcacaaccttgaacactataatctgtttttaccgctggattatacgttgccggcatggttgcagaccatagataagtatgcgtgggataccatgttcttcctgtttgcagggaaggcatatgctacgttctctttgttgttcggatttagtttctatatccagtttcataatgcggaaaagcgcggaacagatttccgtggacgatttgcgtggcggatgtgcctgcttttcctgtttgcacagttacatgccttgttctacaacggggatattcttttgctttatgcagtagtcggctttgccttgattcctgtttgcaagctcaaagataagacggtcttttggattgctgccatcttacttttgcaaccttacgaatgggggcgtgccatctatgcaatgatcaatccggagtatgtaccgtcaacagggcattttattccttattataaacttgctcaggaagtgacatccaatggcagtttctttgaagtactccgttctaatatcactgacgggcagatgtatagcaatatttggcaagtagaaaacggtcgcctgttccagacggcagctttattcatgttaggaatgcttttaggacgccggaagtattttatgaaaagcgaagagtccctgcgtttttggaagaagatgctgacaggtgccatccttgcatttatccctctctattgcttgaaaacctttgtacctcagttgattacaaacctatctataatggtcccgtataagattgctgttccgtcttatgccaactttgcttttatggtcattcttgtttctgtctttaccttgctttggtttaagaaggacacaggatataactggcaaagtctgctgattccttacggccgcatgagtctgacaaactatatttctcagtcaatcatgggagtaactatctattacggattcggactgtcaatgtacaagtatgcaggagcaacgggaagcctgctgattgcattgcttatcttcactattcagttgatattcagccgctggtggcttgcccgtcataagcaaggaccgttggaattcctgtggcgtaaaggaacttggatttagactcttataacgactgacaggcgcttattattctcaaaccattctcatcgcaatgagaaaaaattctcaccacagtgagaaaaaatactcattgcaatgagaaaatattctcaagcctatgagaattaattctcactgtggtgagaactttttcttattaaagtgagtataattcttgttgtattcatcatttataagaaagctaattcataaaaagtcagctcttataagaactctgccggccacattacttgtggaatttcactgtgatttctgccgattggtttccgtaagtccagtccggaccttcttgaattaggcgtatggcctccttatccagagacttgcaaagactttccttgactttaatgtcgaagggacgcccttctttgttaacaaagaaagtcaaggtaaccttgcctttgacttctgcgcaagcgtcgtccgcagggtatgccagattctttttcagatactttttatattgcttcattcctgttacgggttccggaacgacaggaccctgtaaactatcggccttttgggagataacagcgtcttttaatgtatctgatttctgtaatgcacccgaagcttttttcaaatctttgatggatacggcagaaatggctcctgtcacagctacctttttctgtgcgccatatcctgttactacgacttcatccagtgttgttttattttcactcatggctatcagcatagtcttactggtgtctgccggtatactaaccggattatagccaatataatgtgcagttaatatttcattaccttcctttttgggcaaggagaattctccgttgatatccgttatcgctccataagttgctcctttataagtgacgttagctccgatgagtggttctcctttgtcgtccgtcactttccctttgatcatgttgttcatttgggtggtcaattgagctgctttcatctttttcctgttggcatccaggaaagaagtatctgtaaccgttgtgatagccgcttcttccagctcttctgccggagcaaccatttcttccattatcggagttccggcaggcgttgcttggggagtcgctgctttagaagccactgctttaggaaccgttgcggaaggagcccccgaaggtgtactttgggatggagaatcctgccttgatttggcaattatatcttttccaaccgtttcctttgtggcagaagggcgaccggaatccggttccatctttggagcggatagggaagtatcttctttgtgagcaggaacagttgccgtggcagagggctgctctttagctataaacacatcctctccaacgttctgtttcagaaacaggaagtaactgctgattccgattcctataatcagacaggcggcaatgctccaggtgacggcatacgtatttcttttctttgccgaatgggcgtttaccttcatccgcaatttattaatctgttcttcgtggtccccttctacttggtggtacccatccattgcgtcagccagaaaagggtctttcatcgactctttttccagtcgatgcgcctcttttcctttgcggagtcctcgtatgtagtccaatagtttcatagggcttgtttcttaatacaaattttcaagtttcgctttccgttctggatatagcttttcacgttattcaaggtaaatccggtttgttcgacaatatccgcatacgacatttcttccaggaagaaacgtgtaatgctggtcctttgttcttcgggcagcttttccagacagtg

SEQ ID NO: 4655 - DNA, 1589 bp, Unknown
  gut microbiota DNA sequence
taagaatttattcgttgtttgccaatagaactttttgtttcccaccaagagcctatttccttgaaacctccggtttctgccagtttctgtttgaagtatttctctaacaccctacctgaataggtcggataatcagcttttgctaattgtctcaaatcatcaaaattctgtaattcaatataagagcgattctgctcaatatatttaaaccagaaattcaagaaattatcaccaataacatatcgtacatttttcttagttccgggttttgcaaaaataggacgttcccgggttattaaattgtatacattctccagtttgcttaaataacctccgatagctgtaccgcccaatgccgattctatctcgccttgcgtatagtgcccgttggcgatttctgacaaaatggaaaaataggtaccatagtttttcccaaactcagttatcaataaattacgtccttcatctataaacaaggagttttccgaaaagacaaagtcatacatcttatctatagtaagcgcttggttatcacaaaacaactctacatatttagggattcctcctgtcaacgtgtataaagctaataagtcatcattgctatatccggaagcaagatcctccattatttgtttcaggacaccgatcttaaaagcacgcagacataaaatattgtcagcacgcccaaataggggttcattatgatcagtgaatattttctgcattaaggagtacacagaaccactgatgaccaaatttattttagtttcttgtttatactcatcccaaagattctgcatatcactaaagacgtcaggtcggatattataaaactcttgaaattcatctatgacaatattaaaagcacgtgttttaccaacttcaaaaagatattgcatcaaattggtaaaagtaggtattccttcaggaacgaatatggatagagtttcacgtactatctttacaaaatcagtaactaatatgctttcagcttttcttccaatgaataaataaactgtaggcgttcctttcaaagcctcctttatgagactggttttaccaatgcgtctacgtcctgtgaccacaatcattctggaattttgagtaaatgcaagctcttgcacacgcttcaattccgcaacttctttttctctattatagaatttcataatgatgatttgttttctcaacggccattgactcaaccgctgttgcgaaaatacaaaataaattgagaacaatcaattttagcatgcaaattatgaatgtttcatcctatattataattctttaagtaatgcagattaagtttctaattccgttataacatatctttctatatgtccaaacatttttataacatgggggtatatgaatcggattagaggagataatgcaaatttgttgacatagtactattgataaatagcataaagattgagttagaacaacacaaatacaatacgttaccgaattaaaccgttgataatatgccgtttacaaccttgctatacggtttggacaggacccggagaaccaattatgcacggatgacttcgccggtcattgggcccataatgccaatcttt

SEQ ID NO: 4656 - DNA, 15705 bp, Unknown
  gut microbiota DNA sequence
ttcaagcctaactgacgaatcaactgctgacagaaagcactgttcttccaagctgttttggggcattcgtcccctccgatatgaatgtattcgctgggaaataattcgactacctcatccatgactccttcaaagaacttgaaagtggtctcgctcgggcagaatacctgttcgaatacgccccacgtaggtgatactttatatgtctgtgtagaatcacaagacaattcggggtaagcagccagagccgccaatgcatgccccggcatttctatttcggggattacattgatatatttgcttgcagcataagctactacttcttttatctgttcctgtgtgtaatatcctccgtgttctattccgtcgaatacttgcggatagttcacataataatagtctaccagcgtcttttcacgtttggaacctatctctgtcagtttcggatatttcttgatttcgattctccatccctgatcgtccgtcagatgccagtggaaaacgttcatcttgttcattgccaacaggtcgataaacttgtagatatactctatcggggcgtaatggcggcaaacgtccagcatcagtccgcgatgtacaaagcggggagcgtcttcgatctctacagccggaacagaccagtcggctttcttcttcagttcttttccgtaaacagcgggaggaagaagttgataaatagtctgtacaccatagaaaaatccgttcggctgggaagctgtaactgtaataagggtaggggtgacagacagtttgtagccttctttaggcataccttcttgtagtacgaaactgatagcaggctttccatccacgctttcggcttctttcagagagattccggcagtctgtttcagttgttcggcaaagccgtcggctacctttttaacttccggagcatcggacggaactaccagccggactttgttactcagttcgaagcggccttctttgggaacaagctggttgggttgcggaacgatattgtactcgttcgtcacttcttttggcttctgacaactgggggtaatcataagtaaggacaaaagaagaagggaaatacttttcttcatggtctgaaattgtgttaagttattaatatattgacaggacaaatgtacttgtttaattgataagttccaatagtatagaaataaaaaagccgatgtgacgaacatcggcttccagttaaagtttcagatcactttttatgatcgtataaggtctgtattatcctatcttgcttattttcttgagtttttcttcttcaatgattttgatctttcttccgtcgatggtgatcaggcgttccgtagcgaactgtgataaggtacggatggcgttcgaggtggtcatgttcgacagatttgccaggtcttcacgggaaagataaatactcaatgtcgacccgtcttcttccagaccgtagctttctttgaggaaaattagcgattctgccagacgtccgcggatatgtttctgtgtcaggctgacggtacgttcgtcggaaatgccgagatcgatagaaagctggcggatgaagaacatggctaaatcattgttttgagcaataagcgtggtaatggcagtcatggggatgagacagataacagaaggttcaaaagcagcggcagcagttacgaagtcttcctttgcgaagtatgcacggtacgcaaagtattcccgctgtttaatcatgcggataatctgacttctacctcctacaccatctttgaagattttgaccttgccggtaatgaggcacatcaaatgagagggagtctccccttcgcagtagatggtttcgttttttttgtaggtctgtattgtataattgttcatcagaaactccctttgttcgttattcaaaggagctaacaaatcggataatggttccgaaatatcgatgtctgacatgttcatttttaccatgggtgctacaaaactgtgttatacagcacaaaagtagaaagaaaaaatgagaaaatgaacgaatctataaaaagattgcacaaaagcaggttctttcgtgcaatcttcaggagctttttatttggtgaacaagagttccctgtacttgggtagcggccatatttcgtcgtctacctccatctccaggtgatcgatatgatcgcggattttatcaagataaggacgtactttttcttcgtattcgaatgctctctctttgtagttgtctttgtgattggcaacttttcgggcttcggtcatttcgcgtaccaatactttgatggaagtcacccggtgtgagatttcgcgaatcagctctttgcggtcggcgctcaatacttcgtattcttcgggagagaagatttctttcattttgcaaagattctccaatagccggttctggtaggtgacagccgtcggcacgatgtggttgatggcaaggtcgcccaatacgcgtccctcgatctgtaccttcatggtgtatttttccagttctacttcgagacggctgttcagttcggtttcgttgaagatgcgctcaccgatcagtaccgatttcgactggttgtctacgtagtgcatcagtgcttccggcacgtggcagatgttggtcagtccgcggcgggcagcttcctgtctccattcttctgagtaaccgtcgccttcaaagcggatggcttcggaagcgatgatggtttctttcagcaggcggaagatagcttcgtctttgcccactccttcttccatcagtttctccacagatgcgcggaattcgttcaactggttggccatggcggcgttgatggcgatcatggcggcggcacagttggaagaagaaccggcggcacggaactcaaagcggtttccggtgaaggcgaaaggagaagtacggttgcggtcggtggtatcgagcaagatttccgggatacgtccgattcccagtttcagcgtagtcttttcttccggtgtcatcttttcgtttcctacttggcgtacgatttcgtcgagggttgccgagagttgtgaaccgaggaagcaggagaggatggcgggaggagcttcattcgctcccagacggtagctgttgctggcactcatgatggaggcacgcagcaggtcctgattcttgtataccatcatcagtacgtttaccaggaaagtaaggaacagcatattgcctttcggattctttccaggggcaaacaggttgatgccggtgtcggtgcagagcgaccagttattatgtttgccggagccgtttacgctgctatatggtttttcgtgcagcaatacattgaagtgatgcttgcgtgcgatacgcttcatcaggtccatgacaagctggttgtggtcgtttgccaggttgcagttttcgaagatgggagccagctcgaactggttgggagctacttcgttgtgacgggtcttggcagggatgcccagtttgtgacattcgatttcgagttccttcataaatgcggtgacacgtggaggaatggagccgaaatagtggtcttccagctgttggtctttggcggaagagtgtcccatcaaggtacgtccggtcagacaaaggtcgggacgtgcattatataaggaggagtctacgaggaaatattcctgttcccatcctaagttggtaaagacgcgtgttacgttcttgtcgaatagctggcaaacatccgtggcagccttgtctacggcggcaagtgctttcagaagcggagtcttgtaatccagcgcttcgcctgtgtaagagataaaaatcgtagggatacagagcgtggtatctactacgaatgccggagaagaaacgtcccatgcggtatatccgcgagcttcgaatgtattacggataccgccattggggaaagaagaagcgtccggttcttgctgaatcagcagttttccggagaatcgttcaatgactccgccgtcttcgccgaattcgataaagccgtcatgcttttcggcggttccgtctgtcagaggctgaaaccagtgtgtgtagtgggtgacgttgagcgacttggcccagctcttcatgccgttggcaatcaggtcggctatttcacggctgatcggtgtacctttttcgattgcatcggtaacagccttataggcttccttcggaagatactcctgcatcttcttgcggtcgaatacgtggctaccataataatcagagagtttgttggaaggggcagtaacttccagcggcttccggttggaaagttcttgtaatgcgtaaaatctcatttttgacataaatcgtcttctttttatcggttgatggcgcaaaattatatgttttttctgaaagtacccctatttaaaagggggtattttcagaaaatgatatatttttctgaggaacaccccctctttaaaggactgattcgtctctgaattaccttttgcccgtcatggcgctttttgattataaccgattaagagatggatgccagtatttcctgctgtccgtccttgtttttctgccggtcgatttccgcagccatctgtttgactaacatttctacctgcatataatgcttgttcatgtttctgtatagcagcttcattgtaggactgtccatagccatttgggtgaggaactgtagatgcttccccatcgatgcgttcatttgcatacgcgtttttttgtttaagtcgtcctgtatggagtaggcaccgcaggagagcaggatttctgccatgccatcatcccaagcgtgcatggtgagatgggtgagtgctcccacaattttcttcaggtctttcagcagaatgtttagcatttcgaattcagtgcggtttacggagcaggaatccgggttcaggaagagggcgaatttgaggtagaagtcctttaattctctgtcattaacaataaatacattttggggagcttgtgtgatacctcccaccgttggttgaacggcaacttgttctgtttccataataagtgattatgagtgtgtggtaggcgaagattttctaaaataataagagcggttccgcctttcccgttgcatttcaccagaaggcagtagatgcattaacattctacacgggggtacggaaccgccatatagatatgaacgtggacaggcataaaaatgcctgccacgaggattggcaggtttccccgccttctggtatgaaatgcataacaaagatacaacatttttctttttcgtcaagaataaagtggaaaataaaaggcaggtgaggataactttaacacggatatgcagggatgccttatactgatgctgttacttttactttcgtttagttggaagggactcattctttatttaaaccctgttcgtgcctaaaaggaatggtaagcattttagttcaaaactgtacgttaatgaactaatcattcgtcttttttattaagatttaattctgtttttgcaaagaactagtccccattatacttaaatctattcgtctgacagttgttgaactttcgtctgacaactgttactctttcgtctaacagctgtcagacgaaaaaataacagctgtcagacgaatagttttatgtatagtcgaagatagatttattaaagataagaggtaaaaaacgtgttaatcaggattagtttatagcctgcctcaagatgacccataactgtgcagaagtgatttaaatcatgcaagaatgaatcaccttctacatagaaatgtgaatgtagcataagtagaaaaatgtccatgaaaactgatatgatgcgtggcatggggaaaggattttccttgctaactcttttttgcagcttaattcccttgcttttcgatattcttttttatatttgcctacaataaacaaggagatacgacgattgaaatataagatattgataggatgtatgttgtgcttgttctcttttattccgaagggggcagccaatcttgttcttaatccttatacaagtcaggagatatctgctgattccatcattgagcgtgtcatgacttttgctccctcttatgaaagtatagtgagcgactatcgcgcgaacctatatataaagggtaagatgaatattcagaagaagaattttatcctccggtacgttccttcgatgtttcgcttgcagaaaggggtacgtgaatacttgctcgaaacgtatagtgacctgcattatacagctcccaatatctatgaccaaaaagtaaaggcatcacaaggcaccgtgagaggaaacaggggactgccggggctgcttgaatattttagtgtcaatatctactcatcttctcttctgaatgacgaacgcttgctgtctccgcttgccaagaacgggcagaaatactacaaataccggatagacagtgtgatgggcgatcccaataatctcgactaccggatacgtttcattccccgtaccaagagcgaccagctggtgggcggctatatgattgtcagcagcaatgtatggagcgtgcgtgaaatacgtttttcgggacggtcggaactgattacgtttacttgctggatcaagatgggggaagttggaaagaaagatgagtttctcccggtgcgttatgatgtggaggccctttttaagttcctgggcaataaggtggacggcaattataccgcttcgttggactataaatcaatagaactgaaagaaagaaaggttcggaagaaggagaagaaaaagtataatttgtcggaatcattctccttgcagtgtgatacgaatgcctataaaacagatgcttccacgtttggcgtattacgtcccattcctttgagtgacagggaaaaacaactttataaggattacgcatacagacgggataccgtgtcggtgcaacgaaaatccaagagtcaggctttctggggaacgatgggcgacctgatggtggaagattataaattcaatctgtccaatatcggaagtgtccgcttctcgccgtttatcaatccgcttttgttcagttatagcggaagcaacggattatcataccggcaggatttccgttacaaccggattttcagaggcgacaagtggctccgcatcgtacccaaactgggttataactttacacggaaagagttctactggtcgctgaatgccgactttgagtactggccgcagaaacggggctttttccggttgagtgtgggtaatggtaaccgtatctatagcagcaagatgctggacgaactgaaagcgatgccggacagtatctttaatttcgacctcatccatctggattatttcaaggacttgtatttcaacttccgtcatagttttgaaattaccaacggactggatatcagcctcggtttctcggcacacaagagaacagctgtcgagaaatcccgttttgtgattacgggtgactatccgatgcctccgccggaatttatggaacgcttcagaaatacctatatcagctttgccccgcgcatccgggtggaatggactccggcgctttattattatatgaacggaaagcgtaagatcaatctccgctctgactatccgacattttcggtggactatgaacggggaatagaaggagtatttaaaagtaccggagaatatgaacggatagaattcgaccttcaacataagattcagctggggctgatgcgaaatatttattatcgtttcggcttcggggcgtttaccaatcaggatgaactgtactttgtggactttgccaattttgcccgtcataatctgccggtagggtggaatgatgaaatcggtggtgtgtttcaggtgctcgacggacgttggtacaactcctcccgccgctatgtacgcggacatttcacttacgaggctcctttccttattctccggcatttgatgaaatatacccgctatgtgcagaacgaacgtctttatatcagtgcgctctctatgccgcatctccagccatatctggaagtgggttatggtatcggtacgcatgtctttgatgtgggagtattcgtcagcagtgagaactggaagttcagcgggatcggatgtaaatttactttcgagttgtttaaccgatagttttttcttcataacagttgcataatgtatagaaaatacatatctttgtgaggaagaggatgaggaaaaatttagcagaaaagaggtgtagtcgcctcgcaggcacaggtattttcctggaaaataaatctctggtataaatacctctatttattttagtaaaatctcatcctcttcttctcctttttatatatgtaacaacaagatggacggaattttaattacgatacttattgttaccggttttctgatttataaattgatttcttcgagccggaaacaggaaggatacaagagatggaaagcaacaggcagcggtaatactactaacgaagagacttccaaaaacaaatgggaacatggagcctggctcaggcatgctttaggagtagtcactcctaaaatgagaacatgtcctgtatttgatgaagaggcggtggtgtggtgtgccaatctgttgggaatagaggtgatgaggttgaaagagatactgcaggatgtctcttcgcattatcgggagttctggatcagaaagcggagaggaggataccgtatgatctctgctccggacaaggaactgaaagccattcaggatactatttatcatcgtatattactgtctgtaaatgtgcatcctgccgctacgggattccggcgtcagcattccatcgtcgataacgtccgtcctcatctgggaaaacgctgtgtcttgaagacggatatccatgatttctttatttccatacgtagtccgagggtgaaaaagactttcgaaaagatcggctatccgaagaatatatcgaaagtgctgggcgagttgtgttgtatgcgtcggcatttgccgcaaggagcgtctaccagtccggtactgagtaacatcatcgcttatgagatggaccggaaactggcggcgatggcggaagaattcgggctgacttatagtcgttatgccgacgacctcaccttttcgggcgatgtctttccgaaagagcaggtgcttgcgcgggtaaaggaaatcatcagggaagagaagtttgaaccgaatcatcagaaaacccgttttctgaatgagaatgacaggaagataatcacgggagtatctgtcagttccggtgtgaagctgaccattcctaaagcccgaaagagagagattcgcaagaatgtctatttcattttgacaaaggggctggcggaacatcaacgcagaatcggctcccatgatcctgcctatctgaaacggttgatagggtcgctttgttattggcgttccatagaaccggataatacgtatgtagctgattctattgctgctctgaaacgtttgcagaaggggtattgacgggtggcggctgtttgtgtctgccttaccgtgttaatcgatgatcgttgcccttccgttttcaactttggcataattcctttttaccgcttcctgaatccctctgagcatggatgcttcgatgtttgaacccatgtgtgtgaagccgaatacttgtgcgcatgcttttgccaaatcgggtaaaggcaggctgatggaattgattaatatttgttggatggcattggctatttcttcgggtggcagatccgctgcatctcggtcggaatcgggacggtactctgaataagaacggtattgcgcttcatctttccagcagaagataagcccgtcatgttctatgcggtaaagatgtaatgtgtcgaatattatttccaattgagcatctattcgtggtcctacacggttgactccccattcggatatgattttctttccaagtaaggttttgctgatcggggcttcattttctattatcttttggacttgggagacaataataggattatttcttttagcgaagatgtcgtcggcagcgtacaggaacggacgtattttagtattattataattttgtacggagataaaagaaaagtttgtgtatacgcatgcagattttagctgcatcggcgtttcctgcacattcttttctcttttttcttgttccttttttactataaccggtttctccgctttcatatcctgagcaatcgctgcttgtatagacgccatcacttcatccggcttttcccaccagtccatcgtccatatacggcagatattccatcccagtgctttgagtacattgttttgaacaatttcccggtcacggacagtcttggtacgtctgtagttctttccgtcacagataatacctaattggtagttggacggggtttgagtatcgacaatgccaatatcgatcttatatccggaacagcctatatcagtatgtacggtatatcccaaagaacgtaacttgtcggcaataatcttttcgatagaagtttcttcttccgaggtccgaatattagtcgaggtattcagtatgcgcttggttcctttctccgcatattcaaggaagcgtttcagcccggctactccgatagaagaagttcggttcagatcaatcatgtccgatctcagcgtagaaaagatgatcatttcgtatcgggcacgggagacggctacgtttaaccgtctttcacctcccgcacggttcaacggaccgaagttcatgctgacgcgcccttcggcatcgggaccatagccgacggagaacagtatcacatcccgttcgtctccttgcacattttcaaggttcttgatgaacaggggttcttcacattccagcgcaaaggtttccagttcaggatgaaaggcgaagagatcggatagcaaatcttctatcaacgcctgctgaaccacgttgaaagtaactacccccatactttttctccttaatttttcgctcctcagccttctcgctatttcgtctactatggcttgcgtttccgcttggttctgacgggattttcctttgtcataataaccgtctacggcgaccattctgactttcgattcaatattgtccggtgacgggaaagtcatcagcttattatcgtaatattcggagttactgaaagcgataagactttcgtgtttgcttcggtaatgccacagcaggtatttggaagggatagagagagcgaggcaatcgtcaaggatactttccagatcttctatctcgatgttgtcttcgtcaatggtattaacggagaagaagctggtaggcggcatctgtttggggtcgcctacgataactacattcttgcctcgggcgatggcacctaccgcttcgtaagtcggcatctgtgaagcttcgtcgaagacgatcaagtcaaatttctctgcatcggcatcgatatattgggcaaccgatataggactcatcaacatacacggacacatacgggacagcaggataggtatttgatcgaatagcttgcggatggatattccgcgtgcattattgcgtatattcttttgtaatattccgacttctgaactttgaatggcttcgtgggtgaaggacggaatgttggaagccagtctggcgaacagttcctttttggtaatgtcctcgaagttggcggatacctgcttgtatttggttataatatcattgaatatcttgccgttgaataattccagcgtcggttctttggcgatgatatagtgaataacggcttggtagaaactcttgcggaagctgctggtgagtaaatccgtaggaatattcttttccttatattcttctgcgataaatccgagacccaactcgttcagtttgttgtaggattgaagccattgataccagtctttgagtttgtccagattttctttccatattccggcttgctgtagggcgatgccgatccagtcggcggagtttgtataaagcgtctctacggttatgcccagagtggtggaaagccgttgctcggttgccgtaagcgtgtcgaccagctgatacaattcattcagagaatgagaatggatatctctgaatgtccggataccttctgtcagttgtaacgctaagttctgtttgattcgggatgttttcgccacatcttttgaataactcagtaacagggaatgaagcgaagatacctcatggatgatctgatcgatgatgggccactcttcatctcttccgaatcttccgaataaagaaggcagcttggcggtgtatctgtctgtaaaatcaagctcttcctgataccggatgacctgatggagcaaaggctggactgtctctggctttaccggttgcagagcgtaaggacgaatcaccttttttatttttctttgtccgaaatatcgtgggagaaaccattgggcggatacccgattccattcggccagcatggggccggcgtttatcttcagtacctctttggtgaatccgttttctatttctgctttgatttcatcgcgttttctgccgtgttccgtcactttccggtactcttccagcgtttcatttaataaaggagtggtcagcagttcgggcgtcagttccggaatatcgagtatttttcggataatggcgctgattatattgaaatccttgcgggtgggatgaatgtccgtattttccagtaaagcggaaaagacaggcagtttcgattgtatggcagtcaataagccaatgaaagtggcgagcgtttgtaaggcttcctctttgatggcggacgaatattcccgaatgaaaatccctgtcaatgggtgaagatacgggtggccgcaagcattggcggtactgaccaaagattcgatggcatcttcccaatgtgagaatcggtctttgtccagattgtccagataagatgacggaatatcgaagcagggttcaacgtctgttaactggtagtggatgatcgcatcatagagggaaagtccgaaaggatattccttgtgtaaggcttcgatgtatttgtttagttccgttcgtaacttcagcaggcgttcggcttccttcatgaactcttcgggaggagttcgtctgatgatttcggttgtctcctttagttgcgagatgacagtggatttctttgtcttgttggaatgaatctccagacagaacggggcaagccctatgcccgccagtctgttttggacgacggagagggctgccatcttctcggcaacaaataagactcgtttacctttataaagtgcgttggcgatgatattcgttatcgtttgggactttccggttcccggagggccgtgcaggataaaagtcttgtcgtgcaccgcttcataaatcgcttccagctgagatgaatcggcaatgataggcagtacaatatctgccggagataactgcctgtccatgtaggcggcatccacttctttcgcagttacgtcccattcgatctttccgttgatgaggctggagaccaccttgttttgagtcagtttgtgagcattgttgtggatgtcgttccacatgataaacttgttgaaggagaagatacctagaatagcctgttcctccacatcccatttccgctgattcttgatgcagtgccggatgatggaataaatcagttttacgttgattccgctttcgtccgtcggaagcggatcaagtcccggtacggaaatgccgaaattctgacgaagcatttctaataaggtgatattcatcatcgtttcttcttcccgcgaacgaatcacataccccttggcggctgacttgcggatgatttcgactggtagcagcaatatcggtgcataacggggacgctcgctggaaggcgtttcgtaccatttcagaagtccgagagccagataaagcgtgttcgctccgttctcttcgatagaagtacgggacgaacggtacaggtgagtcagtgctttgcccaagtcattctccggcaagtaaaaacgtaaccttttctgtgaaagctccgaattaacgaagtcggctatcggatccgattccggtatggaagaataaatgccaaattccatcgccggattctcccattcagcgggacggtggaggatacgaaactcatctccttccgccaaggcgtcttccagacaggcaaggtttgccggaatcagctgaagagtattctttgtaatccggatattcagcaagttgttgcgcagactcaaatccagcagtcttctctcccaaagcaactgtttggtgaggactgtctgagtttcgctgcccgacaaatcatacggattcacactttgcggagtggcgtgcgtggtatttctgttcatatcctcatcttcctttatttcccatacttgtccgttcagtacgcgctgcgggatcgggcggactcccgaatgcctggcccttctgatgtcgatggcgaggatgaaactgcccggatcgctcagtttgccgttagcgcttttcacggcgttgtcgaagtcggcattatgtcccatattcatgcaggtggtttctaccagcgtgatgtcgtagattccttcggcggttcgtttggtcagtaaggatacatcgtcgatggcagggtctggaaaggtttccggcaccagccagccgcctgcgaaagcatgccctttggtgatgacgatgagggcattcagtccgatggattcgagacaggaagcataaagcagtgccatatccagacaagttccgagcttttgtgccagtacggaatctatcagacggacacactgcccgtgctcttcgaagctggcgggaatggtgctgtaaataatctgctgttcggtgagggcggtgtagatagctgccatctgctttctcacacggtccggattgcggctttggtattcgtccagtgaaggagtaccggtccactgttccagaatggcggcggctctcttgataataggagtgagcacggcatgattcggggtgatgaatgctgccagcatctcggggaatatattgattccgccccattggtcgtatgccagaatgtcgatggggtaggtccgggtaaagatcgtttccgcctcggagcggatttctattttcagacttcccgacatacgctcggtcagctgggcgaaataattggcggacaagaccaggctgaacgattgcagacacacggtattattggcgggaatcgcttccatcatcacaggagtgatactgccgaagtcgggctcggccgtgatttgtacctgaatgtttctgaagggttcggacgtcatattttcaatcgaaagctgatggatgaccgatactttgttttgctgcatcgcgaaattaataagtggcagataatcaaactgcaccctgattttgtccaatgttccgttcatgttgaaagtcgtataatattagatttgcaatattacaaaaaatacggatattaccatcttttctttgggtattcttttgtcggtcaagaaaatattcctacctttgcgcccgatttatagataatataatgtcttattcaattaaagtattaaacaatttatttattaatggaaaacttaaagaacgtagctcctattgaggacttcaactgggatgcttatgaaaacggcgaagctgtaacaagcgcaagccacgaagaactagaaaaagcttacgacggtacgcttaacaaagtgaacgaccgtgaggttgttgacggaaccgtaatcgcaatgaacaagcgtgaagtagttgtgaacatcggttacaaatcagacggtatcattcctttgaatgagttccgttacaatccggacctgaaggtaggtgatactgtagaagtatacatcgaaaaccaggaagacaaaaaa

SEQ ID NO: 4657 - DNA, 4595 bp, Unknown
  gut microbiota DNA sequence
gacgcatttgtaatccctgttttcccatcgcattgaatagtagctccgggtagtacagtatcatctctgactatgaatttaacttcgaccgtgtttggttctacatatacagttaaggatgttgcagacgtcccaacagttatattacctgtcttttcataatatgtgtcatgggtaacagaatattcataggttccttttcccaatgataaagtgcattcaccgtactggttagtcgtccctgtcactccattacattttacggtagcaccttctatgagcaatgaactgtattttacgataaacttaacatccacaacaccatatacatacacagtgtttgttgtatcagatgttatggaaccatatgagaaggtgttgcttgcatatccgtatgcagacacggttccggatatagccgcacctccacgaggtaaagtaatatatccgtctgcatcagaaatgtatgattggtccccaattgtgacagtagcaccttgaacatataccgattggttataaactcctacccgaatctttctcagtggaatatatgtcacagtataactctgagaacgtgtaccggctacaagatatgaacccttaaaatcttcgtgattttcacatttgaacgtaaaatcaatcgttatgttgtcttcagaagttaccttgtaggtatattcgtttactttctcaacttcgtaggcgcattcgaagactgaatttttaattgtataattccgagaagaactgaaggtgaaagtcgtcacaggagcaggtttcaattgaccgtatgtgatagctaattcgggaaatgccgccttcagtttgttgatttgtgcatcagtagctacagagacataacatttaccggtgatgaccgctttgtctacattgttgccgttttcgtccagtcccttcaaattgattagttttatgataggatcaagggtagataatgtccagtctacaccgatcaagcgtacacgttctaacttcatagaatcaagcgcaaagcatctgtcaattatggataagacattagctttgttggtgttctcccatctgattgtcgaaagattctgcactcctgcgagtaccaatcccgcatcagtcagttccgtttgatttcggaccgttaaatttgtaatggtgtccggcaggtgaagcaacgtcaagttaccgccttcgggtaatactacagcggatgttccggttccttccgcccatatctcgcggatgttggtacataatgcaaggtctattgcctgcttcaggttcgggcagttgcgggtatccagctttcggagcaggttgtttgcaccaactgagagcacttccatattcgtgtttcgatagccttccgctccggacccgataatcagctccaccagtttggtcatcttcgatacgtcgaccgaaccgggatacaaagaggatagatcccccaggctgctgatctgaccggcaccaaaaatgatcgtttcagtatcgttgaactggatggcgggagctttaatatgtaccggtacatttttctgtgaacgagtgccgactgtatatgatccgtactggacgttgacatactgcccggcatacgacgtgatggtcatatccgcattaggttctactccttcccactctgaaggggtgtacagacgcagagttgcgaagtcattcttatagtctccggcaatgtatttagagtccatgtatttgaatcggttgtacagccaccagcgacggtgcatcttgcggcttccctgggcagcatacaggtatgatccgttcccttcatccaataatgggcgaacatacttgtaccagctgtcttcattgtagaccgcttcacaccaggcatctccctgttcggtgtcgaagaagcggatacattcttcataagtgagcagcttctttgaccgcatttcagcatacatggctgcgatctctttggaatatgcctgctcgatgttgttccagagagttgactctgcaccgttccagacgtccttgttgccgatctgatcgtggtactcaaccgtatagtcaaatgctgctacgccttcattattcagtccgcacactgtatcattatcatagaagatgcagatccagcgtattccgtcgaaagtagtcaggaacatattcttggcacgctggtcgaccatcgcaaagagttctgttatcgtgtagtacgataacatgaaattcatgtccaggtactgatcagcttcggcccggaacttcgtcgggttatcctttacggagacaagccagtcggtcagacgctttagattcgtgtagtcttcgtttccgtccggataacgagcttcgaagtctttcagccattctatattaccttccgagtcgacggtgatatagtccgaacgtttgaagagtacacgatcggaggtattgttcaggatctcccaactttcacagccggccttgaatccgaatgtttcatccgttgacttgtcgttattgaagttgtatttgcccagtgatgttctctcagcatcttctgatgtttgatgccacatcaccgacgggcggccgttgactgtcgtccggacgcggggatcagccttctgtgcttcagtaaggaaccccatgccacgaaggatatagtcgatcaaacgggccataccggtattgtgtacaccgctagattcggcgaagtccgctttgaagcagaatacgtttacaggtatttcctcttcgaagatggcaactttatcggcatgttcaccggtagcggtcatggtgaatccctgcttgcattttgtcttgaagttctttcgaggataccattgagaggatgttccctgtacgtcgatctctactccggttgctacccagctgcgttcaggatgttccctgtcctcataaacaagggtgacagtcttcttgtctcctttgaaagtcggaagctcaccgacgatggtgaatgagatattctgattcgccagcttctcatagctgagattcccatagtcgtcataaatgttgttccgggcatatagcttgcgcttcagttcaagattatccatatcggcaatgtaattgtcaagaagctgatagcggtttaaggcattgtcatagacacggatattaaagatatctgcggtacagtcactgctgccgatcgagatcccggcaggattgggctgagtaaagttgtcttgttccggatactggatcagtccgcagatctcaccgttgatgtagacgaagatcagccggttctccgctttcttttcgatcacgaaggagatccggacacgttcatcctctttgaattgtgtttcgatagaggtctgttcggatctgaatatggctttctgtgcggtcacttcaagtccgattcctccgttcatgcagctgaggatgactgagtcgtagtcggtaacatctcttgtttcaaattcaaattcaatagtcttaccggttgaacggaagtcgttggcaaaggagttgtaggggatggttacacgtgcatcaccattaacgcgaagagctacgaatccgtcaaccgtcttgatccatccgttcgttgcgtagttgaatgcggtaagtacagcgaagatctcgccatagttccagatgttttttccttcttcgttgttgctgcggttcacggaggtgaggaagagaacgagatccgcttcctccggacgaacatcgatctctgattccctaaccgtcaggttgaatgttttgctcacaggtccgcatgcgattttcagctccaggtctccgggagcttctgcccggtaactccatgtttgtcgcgtgcggtctatcgtttgatcactaattacgattccattagctgacagggtgatatcacttgtcgttgtagcaggattataaacgatgtaggggagcaggagtgtgccgaattgttccacttcggcagtcctgaaggatgacgcaataaccggtgtgttgtttccggatacaatgctgataatatcatagcgtagacgatcgctttctacttcggtatcgttgatcgttgccgtcgcataaacgtcgagcgtatgtgcaccatgcgcctgtgccgggattgaatatgtctgctgacgattagatacagatgtggtgtaggtacccgtttctttaccatcaacgacaaagtgaatggttttctctacggcaccaagcggggtatatgggaatgagatcgctcccacataggcttttgaatcatcgaatgtagacgttacggcaatgcttaccgcattgatcttgaatgtcagcttgcgggtagctccgtaactgtcggtaacttgtacaacgaggacgttatcaccgagtatcaggtatttgcctatattgaatgagacttcgccttgattgattgtttcggaggctacctgcttattgttcaaagtataggttgcgataccttcgccggtttcctctccggacaaggtagatgagtatgtgtacttgatcagtgtctccttaccatgaacggccgttgcatttgacggggtgacaaaggcaagcgtgagctttgttcctccgccacctgcggctgctttcacgggatagaatacacctgctcgtttttgcatcatgtagtt

SEQ ID NO: 4658 - DNA, 3271 bp, Unknown
  gut microbiota DNA sequence
gatcactaaaataagagagcaattcaaagttattttttgagttgctctttttcataacgcaagatgtacaatattttaaaccaaggatgatggtaaaaagaataaagaggtatactcaatatctgtccgaaagcagcacaataagaaattaaatttcctattataaagaatctaaaacaaatacaaatgtcgaaatcgtacaataggaatcctatacgattgcttatatttgtactatcagatcgtttttcaacagataccctttctaaatatgtacaaagaatacttaccatgccatatacttgctccttacgttgatagatattgggaattcaaaggccaaacagaacaaggtatgcaaataaaattatctacagatggatgtacggactttatgttcatattagaaaccactgttaatcatggcattatgatgcaaccttatcattcttattttattggtcccatgaacgtctgttcgacattaataacatcatcaggtactatcaatacatttggagttcgctttcggccatgcggactatcccgttttatgaaaatttccctaagcgaattgacaaatataaggttaagtgtgaatgacttaaacactatttttagcgattcttttgctgaaaggttattcgaagaacagggtattcagtgcaagattaatttaatagaacgctatctgaaagagcacctatataaaagcagccatacaatggatgcacaaatcgcatatgctgtgaatcaaataaatgcgcatgaaggcaagatatccataagccatttaatggacgaagttaatctgtgccaacgacactttgaacgaaaattcaagttacatacaggtttcactcctcaaagatataatagtatagtaagattcaagaatgcgattaaaatattgaggaacgaatcattcgacaaccttttatcagtagcagtaaaagccggatattatgatgcctctcatttatcaagagaaataaaaaagttatcaggtagtactccaaatttctttttatcattgccactcgataatgagactactatcatttatacaaaataaaaaaagtcgaattcatccaatacccgtgtcttactatcctttatatttgcagcattaactaagtatataaacagtaagaacatgaaactttggaaatatagtgggagatttttaacagcaacaggagtcattcatacgatttatgcactattcatcggaaaagatgctttttcggaaatgctcagaaatggattagtaaattctattggagagaattatagtcaaggtttcaccttttggttcttgatctgtggagtaatacttatcctttgggggcaaacgcttcaatattatatcagaaaagaacaaaaaccagcacccgtatttttaggttactctattttgctgcttaccataatcggttgtattattgaacctgcctccggtttctggctctttttgccgcaagcaattattattatttattcaaataaaaaaagaggattgtgatatccttcaattttgaaaagagggcaagcttgtgcctgccctcataaccattaaacaaatcacattcgaatcttaaagacctactagcgattctggttttagaaactctgccaaaggcagaaagcgtacacacctatacaatagaacactgcataacagcagcattaactagtcacataccgccaaacagatcgtttagaattaaaggtatgcgaatggtgtgagtccggctaccgctttatatcagacatcttgaaatgccgaacattttttccctggggaatattcagatgtctgcaaaatcttctgatatttataatatcattatcacgataataactaaaattccaaatcagatcatccacatttcttacattttcaacaattgccttaaaatatggaaagtctacatcacccagcgaatgaccaagcaatgtaatctccttcaaatcattcagtgactcaaaaaagcccaagttatgatctattatgtcattagaatgttttatgttcttcgcataataattttccaaacgctcctcaatatgatctacagcataatatcttattggatttttccaattcccttttttcatatcctttaaaaagaaagcgagatagaccaacttatcattggcaaaatatttacccttcttatccttcagattcgggcgatatctccgacgatttttatgtttatgaacccactcttcaaaagcgacttcattatcctctacattatgccctaaaaccaaagagccaaacttctgccttctatcaccgtgaatataaagaatatgttcccgggaaatattatattctgtttcaagaaacaatgtataattaaaattcaggtaagcagcgttcggatcaagatacagcatattcttcctaaatcctttcttgtaatgtattgtattaatccatcggtgaaacagatattgcatttcgaaggtacaagaagaaacaacatcagcaacaatatctataggacctaaatattcagcataactaaaattctcgtcatcttcgtataatcgcggcaaattctcatcaacaaaatcaaaaatacgttccctgttcagttcactaagatatttttcaaaatccttccataaatagtctttagcccaagtgttctttggagctggcaatttgcgtccgtattgtaggcacaaaagataatcattataatcatcaaaattattcatcatagatcggggaccgaagaagagttcgaacatcttcacgacaaaatcattgtgctttaataggtagctgcgaaaatccatatatgtagaatcagcaccatgatatctgtcaaatccattacctataatataaagatgatgtatgggatcaccattaattgaatatctttttttttcgataaggttcgagcatttcggctctacgctgcaggcaataatctttcatcccactgaccaattctttcgttgaaaggtcaagtggacattgcatcaaataatcacgagcactatatttgtccatataatctctagctcgtttaaaggtaagcccgtctattctcatgaatccattgcaagctctgtcaattagacgggctctatcaaaagaatatagaatatcactatcgccaatgttcataattatcaaattttcagtcacaaattacagtatctattgttctagaccaaactgtatcattacataaggtaacaaagataataattttcaaagttcgctagtctcattgcccaaaga

SEQ ID NO: 4659 - DNA, 11952 bp, Unknown
  gut microbiota DNA sequence
cttaccgctcagttgctttttcagatcgaatccgtctatcacgtagttttggggaacttcgcatcctgccacagacagaacagtcggatagatatccatgattgtgcccaactgtgtctgcatacttcctacttcaataggcaagttcttctgtactttgctcttcttctcaggctttgcccaagctgcgatgaaaggaacacgcataccaccttcaaactccgtcccctttttacctctcagcggagcggaagaaccatagccacgttcatctcccaatggagcatcaccaccgttatctcctaaaaagagaatcagcgtattttcggcaattcccagcttttcgagttggtccatgatgtcgcctaatgatttatccatgccttctatcaatgtagcaaaagctcttgcctgctcgttcttatccgggtcggtgtagcgtgacaagaaacgtttgtctgcctggaaaggtgaatgaactgcgtaatgggccatattcagatagaaaggtcgtttttcttctacggctttggtgatctcccgattcgcttctatagtcagcgcttcactcaggaaggtatctgtaccgtgatatttctccaggtcaggaactgctctaatcttctgtcccttgatatgcccgtatccccattcgccataatagctgccgggatggccgatgccggaacctgcgatatttacatcaaagccgatattcagcggattctctccttcgcttcccatacagccgaaatgtgcctttcctacatgaatggttttatatccggcttgttgcaggactctcggcatggtaggcatatcttttctgagacctttccagttccattggggcggtccgaaaggattccggttgttgctctcagcattaatccagttagtgactccatacctggtcgcattctgtccggtcatgatggaagctctggaaggggaactcacgctctgtgcgtaaaaagtagagaaacaaataccctgtttagccagtctctccatattcggggtatgataccagtcattcagcggatgacgcaccggctgaccgctctcatctgccaaaaaggggaccgaagtatccataagtcccatgtcatctacaaggaagacaataatattcgggcgttcctgagccaccccgcaaacggaagatgccaaaccacccaatacacaaaattccttaaaagctcgttttgttctcattacatagtatttatgatttatatcctattgtacgtgccataatagatttcaaactcagactctcttctgattacacaaaagagtattagaaaaatatcctattatctttcattcagcataatctatcatgttactattctgctttgaaacctgattttaattcgttgaaataaaaaatttaatttccgtatccaccttatcatggctttatttgaagtgatctgactttataataaagatgtattagactggttttaaaggaaacagctagcaatatacaacaaatgtactacacccacaaagaaaaaaatagtttttgactttctctctgaaaaattatcagacgttcttcttgcttgttctaagcatacgtggagaagctccaaagaacttcttacagaaattggagaagtgaggcagagactcaaaaccgtatttatagcatatttcggagatactgtactcagagttattcaagtcatccaaaataccttccttacgtcgcgcctgcatccattcgtataccggttcgtggaatacattattgaagatacgccgcaaggtgctgacggtataacctcccagttgagccagttcttctaccgtttttactttcttatagttctgaaggatgaagtattcaaaagtggtggtgtatttcgagagtggatgcaccaaactagccaagtcataatccgaataatagtagcttagcacaaacgccagttctttgcgctttaaagacagcagatcccggcagactttactttcactcaaataggatttggaaccatccaaaaagtatttcaattcaggaattatctttaaaggagaatagataagcggagaaggtacatccttcatgatatgattgaaacggaagtcacagaatagttccggctgaataaaacgataatagatacattcgcactcggtcatcgcaagcatctcgtattttgaaccaatagcctgaagaataaattcacctgctttcaacatcgtacctgcatactcctggctattaaccaagagctctccttttatcaaaaaaaggatgaaattatcttcacacttccgggctggttgatggtacccccttgtatgagtaatgtgaataatagcattgtctacggctttcggacagttctgacaatcccaagtaccctgacagattgatgacatatatttgtgttggcgtttgatttgttcctgtttgcaacaaaaatatatgaaatcttttagatggcaatagaaaagggaagaaaagtgaaaaaaggttgcgtatatatagctataagataaagaactgtataaatccagatgatttatacagttcaaaactaaaagaatctcttatactctataattattttgcactttcaggagtttctgttgcattattccatccattaacctttgtatcgatctgaacttttgctgcaccagctggtaatgttaaaatatacaatacatttttaccaacttcccattcagcgttagcaggtagagtcaccgttttagttcctttatatacttccatctcaccttgcttagtagagtacgatattgatataatttttccatttactttttgaggaagtagcatccaagaagcatcagcatcagctaatgaatagtactcctttcctgccaccttctcagcagattgttttacatcataagaataagaattcactttagtagtccctgtcaaatcccaattgccatctgatgcatcaaagttatatttggctgtaccgccttgaatatcagcaatagaaatagctgttacagtataagtaagatttagatcccctggaatatatgcgaaatttacgcgagttaaaacgtgtttaaaatccaaagtcaatttaccatctgcacttacaccagcatccgttgaattaactacattagcagcatgtgctactaccaaatcaatttgatttgcaggagtagcattaacttcgaaagaaatcgaaggataaccagtagcaggagcaaccggatcaacagtaggaacactatagctagatttgaccgtagtaggatacgcaaaaaattgtactttcttttccgaatccaatgatggccaataataagagccggcatcctccgtgctccaaactgaagcagcatttgcttttgtatatgaaactccattcatatatgcattacctaaaagagtcgtaccatcataggtagcacttgttacataagaacttaccgtaaaagctaaaaaattatcagtggtagtatcagtggctcttgtcgccttcttcactactgaagtaaaaccaatttttgcttgttgattgggattctcaaattcttcgttctgtgagcagcttgtaattgttgcaactgctgcaatcgccaataatacctttttcataatcgtatttttttaagtttataatattgttatattttgcttatgctttatctcaaattacgggcaaaggcacctcctcctcttctccccaatcaccaacatcaccgccaataccaccatcaccaccagacgaattttccggcttatcaaccttcacctcatcatcatcaagcggtaactctatatctttagaaggctcatcgttgcctcccccttcaccactctccgaattaacaatcacatccgttatatcaacctctatcttctgtaccgtattatccaccttcacaaatgccagcgtaaactttatagcaagacttgcccgactcatcgccccttccggtagcccaaaagctgtaaaactacccgttacttcgcccgaacgtccttgcgcttcaaagtagataggagcatcgttcattttcccgcaacatctgcccaaacagtaacaacccgccataccttccacactgccaacgattgaagaaacatattccagcccttccaccttgatcttgaaagaataggtctttaccactaatttcggtttccaatccagtagaagctcttcttcactgttcgctatatgtaaatcatcgatctgcactacgtataagggatcaggtccccataccattttctccgttcccgctattcccaaaccattgcaatagcctgtaaatgcttcaatcgtctcataggcttcctctcctctgatctgcaccgtttcagtgtcgtagttgtaagccactaccgaataacgccccggcggcacctttacttttccacctcttactgaaaggtatgtatcaatctttctgccttccgcactcttcggataaaaaatcacccgaaccccttccggcaacttatcggtaacaccgttccaatctaactttatatctaccccgcttacgggataatcatccaatagttcgcgacggctacatccggtcagcatcagcagcgaggacagaagcacaagaagtatgtatcttgtatcttgcataacgtccttatctccctctttttatcagccataccagagagactttcgccttggtaggacctataaagttataacgtccactagttgtccacacgatatccccctcgtaaggagtatatttcttatattctgttgtcagatacccgatgccgaagctaaattcgagcgacagatggcgagccagttgccgcgcatacccgtaggtcactcccgcagctccgtaataatcgccccggtaaccgtcgcccttccactggaaatcgtaaattccaccttcagcataaagcccaacaaaatgccctgtcaaccggttgcgcttctgacgattgcccaaccagcaacgtccttccactcctcccgaaagaagctgataacagaaatcatgtttactgttcagccaccacggacatttgtattcagcatttaaagaccaccttttgcctaccggaatctctacttccagatttggcgccaacgccaaatcgtacaacagattattcttcactgcaagcaccgttttactttcaaccggcccttctgcctccgacactaccacctcataagccatactctctttactttctccctccggcttatcaggttgatcgctcggaagcgcctcttcctgctttgaaacaaacaatccggagacagaagataccggttcaaaaatattcttttccatttccggaactttgcggacaaccgtaatctcagcgcgtctcaacttaggtaacacgttgcggacaatatatcggtaagccattccctgattcaacttctgcaacagttcttttcgcttcacgatgttatcccgatgataatctatcaacatcaagacttcttcccggtccggcaagtctgaatccgacgccaccaacttacgaagttcagaccaatcttctccttccgaagtaagtttaatattttcggcatcaacatacggataacgttgccttaagaactctctcatcgaattgtttcttcggacagataatgcggcattgtagaccgaatctccgtcaggcgatacaaaagtgaccacattgagcgcagtgatatatcttgaatttattctttcttcaagcaaagaatctaaaacattaatttccttgttattagtcttataacggaaatcaacatctatttcttcctgatcgaaatatatcaccacccgcctgatagtgtcactcgcaaccgtgagaaccggaaccactgcatacacactttctgataaagcaagaaatgccatgagaataacgcatgtatagattccgtgtttcataattgttcgtttctgtgaacaaatatagaagttataatataaactaaatcatactagcagaacaaaaaacaggacatggaaggttctgtgaaacgattggaacgaatttgcaagtttagaagcaaataaggaggaaacaatagatacaccaaggcattatataaagaaaaaatgcacagaaaatcgagtataaccgattatctgtgcatttgcaacttttcaataagcctttcccacgctgtctgctacctaaaaagaaagtacagaagatttatacagtcgggtccggcgcttcttcatcaccctttcctccgtctccaccgggattaggttttacgctaccgctgccattgttactacttccgtccgtatagtccgtatccaactccgcacgacgggtaatactcatatcatccaacgtggtcttgaatatttttccaggatagaaaaggatctttctttggacgattgacttagatgatacttccttctcgtcatccgcactcttagcgcgaatggtagggctgaagatgccgaactcacccatctgaacactctttccgtcgtcaatgtcctccgccatcatatcgacaagaccgctgacgaccagatccacaactttgcggtgaactccacaaagacggctcaccttgccacacatcttggaaaaacttactctgccggaacgaaccgactttgctacatacttttcgtttttgtccttgtcaaaaccgaacactctttttgttactacatactctaaagccataattgttaaagtttaaatggttaaaaaaataaaggttatctgtttgccattccgttttgtctgaatgactctgcaaagatataacagggcgcaaaccgtccagtcccctttagtcccccttgtgtctcctttcaatggctttaaagcagtaaatatcctaaagtaattcgcttattttcaatcgactatacagatgaatattttttttccaaagtgcgttcattgctgtttctccaaatagagtctgtcggtttccagtctccatataccgacatacccccgcccgcaatcagtagagaaggagcgcttcgaaatacaattctttacctgcttactcagagtctcactatctcccaatggtcaagtaaacatttccaatgtatctttacctatgacgagatattcccctctttgatctgttgccttaacctgtatgcagatgccaacatacaaaaagataataaatagaaaagtgtgctttctcatagctttataattttagaaaaccgaatatacatatatataatagagcaataatactcatttcggtatttatcatatgcgaataaacgaattattctgtttgctcaaatagaattacgtacaaattagctgcattatagtataaccaacgaaaaagcaacatgatactttgtcatacaaaacggtctatgagagaaaggtaaaaatagtcatgcaaatttaccaatatactaatccaatgaatacgatactgccttctcccgatttacccacaatgaaaaacatagacactgtatactaaaaccgtatttgagtttctaataaattctttcatcgtttattagaaacggttcccaagtttattaaaaacaccgatacgcctttcaaatctctttttcttgaatttatgcaacaaaaaaggctgcaaacttttacggagtttgcagccttttgctcattgccgggctacttatgccctaatcctcataaggatctcctagatgttttgttataatcttatactgttttgatgtcaaaaaccgatgattgtacggcaagtaacctgtcggtataagttctttgaccaacgggttacaacctttaatccatcggctgagacaatgcaccgcatttttactcgttgtacatccggggaagtacatcgcagccagtgcagcaaaagataagattcctctcattcgtttctaagttttgatttgagttttattgttgttattacgactacaaatatacaacataaaaaagcctttgtcaagtcctcaagaccttcgagcgttaataacaaattaaagaactggagtactggcacataagcaaggattgcatcgtcaatgactaacaagtttgttactaacaactttgttagtaacaaacttgttagttaataaaaaggctgagattcctcaattcagacccattgtgtgcgataacagtgaaaatccgtgaaagaaatcaaaagagacgcaaatacaagaatattatttggaaggaatagcaagaagacttacatttgtcatgtgatttttttcatagtattagatttaaggttaacaaaggttggagcaaggcgttgctcctttttttatgccccaacctttctttattttacctcagagatttattactgtcattccagtactgtcattgactattttttcggctttccacagatatcaaccttgcattggtaaggcgccaagtccaccattatgttattcgcagcattttccatagaacggctgtcaagactatacacctgctccaaagacaggtcttccaccgtttttgaatttaattctatagtacgtggagtatccgcccggttaaaacaagctaccgctttgcgaccgtcagccaacggctttacccaaatatcataatgatctgcacggatgctgcgctccgcctgcttgcccaacacatcctggttgatagcaatcaggtccctatccaacagaacctgcaatgtactgtcattcatacttcgcacgtcatttccgcaaagtaatggagaagccatcatacaccataatgcaaaatgagacttatactgttcgtgggtgcaaccttccgattcatatccgatactcatactcttaccaccgataccaactaccagcatatccggatcattccaaccggaaggaccgccatattcactcaaaggagcattgatttcaagaatattcaggataccacgaagcccgcccaacttgttggcttcccggttccagacatcgcctatatctcccgaaacgcgccacaaatgtccgcctacctgctttgcccatttccaaggttcgcgctgtccccactcacaaatggagaacacgatggaacgtcccgtagcacgcaacgcctttcccatctttgcatagcgctccatagcctccacccggtcgacaggagcattgcaataatcatacttcaacaaatcgacaccccacgaagcgaaatctttcgcatccacttcttcgtagccgtaactgccgcatacaccgccacaagtcttatcggctgcatccgaataaattccgagtttgaaaccgcgctcgtgcagataatctgccacatactttattccacgcgggaacttatctttattaatctgcaaatgtccgtcagctccccgttcgggcaactgccagaagtcgtcgatgttaatataggaatagcctaaatcccgcattccgttggctaccagcgcatccgcagtttgcaaaaccaactcttcggtgagatgtcgcccgaaagtattccaactgttccaacccatgggaggagtcagcaacaggtcatcaccaatgcggatcacgagcttttccgtactggtccccaatgcgttcttagctttaagagtgacggtatattcacctttagaagctactgatcctgtgataatccctgttttcgaatccagtttcaatcctttcggaagtttctccgcactccattccatcggccgctgaccggtagtaggaatataaaagaggaaaggactggcaggataattgccaatcgcccggggagagttaatacatggttttccttcaaaaaccttttgagaagcatccggcaaagagatatttccggcaacagatacgcttgctacaaaaagagcaagaatagacaaaattacgatacaacgtgtttgattcatagttgtttgttttttattacgccactaagataagggaaaaaaagcaggatgaatggtgataaacattttttttatacctttgccgcccgcaaactaaaaaaagaaatatgatattccacagaatctttcgtttcacctattttcttattttctgtatatggggagtgcaaagctgcaccaaagacgacttaatagaaacgccggcagacacagacagcgaaacaacagagaacccgtatggaataatccggatagcagagaaagacctgactccggatgttttcaaattaatgcttcaggatgatgagcctgccacgattctattcaataacacccagcggggattcagagtaaaccagcccctgcaagtcagcatcaccgagcagcaagagttatttatccgtttctattcgccccgtcctgtcaaggaggtgactgtgtgggcaaccatcagcggatatgaagaagcattccaactggcaaagttcgatgtgctcccagctttcactgaatttcataaggaactgccgatgctgacgcaaagcaagcgttacatcacccgttcaggaaaagaaatccagattatggcaaatccacacctgtccgcagccgacttcaaactggaaatagaatgtaatgacaaatactatcaaaaactgctttccaccaagtccaaatacaacgtacgtttctccgcctatagtcagaccggttcatgggcctatccactttatccggctcacgcccgggaagcggtagcaatgatgctgaactacggctatatgttctcgtcaaaggaatttgccgaagaactggaaaaatacagaggcaaactgcatagtgacgccaacaaaactgttattgacatcgatatgctcctcaaaaaagtaatcaaccactccggcttcgttatcgggaaagtgacaaccgtagacggactgggaggcggagaaacttatggactcaacgaatggtgctttctggaacactacgcagacgacggagcgcacaccagcgccacgtttcacgagttgggtcattgcctcggctacgggcacagcggaaacatgacttacgaacaaacgggaaccggatggattaccctctgcgccaccgtatacaacaaactatgcatcgaaaagaaacttccggtgtactcacgaagattcatgcacacccgccgctatggcaaactttatggcagctcaaaatacaacgcttcccgatacatcatcgaagaccctgaactggatgcaatcgacggtggactatcaccgatattgaaagaagaggatgaggatactgcgcaaggaacaccactctcctgcatcatcacctacaaagatattccccaagccacggaatcgacttttgcgcccaaggatgtctgtgtatatggcaaccgaatctacatcgtgaacaatgccagcggaaatttcagtctggagattctggaagagcagaacggcaaactgacgcacataaaaagcctgaaagagtggacggaaggaggggcaacaaagggatttgccgcaacaccgaacggcgtgaccgtagcccacggtaagatttacgttacaaacgaacaaagccggactgatatttttgatgaaaagacttttgaactggtggcaaccatcggcacaggctcttggggagaaggaagcaaccaaacggttcatgctttcgatgtactggtacaccggggatgcgtgtttatccgagataagaaacgggtatgtgtatttatcgaagacgatattgtccccggaaaaagcttcaaaaatgtgcccaattattgccggacatcgaatatgggagaggcaatgggtacttacgggcagacaatcggcaacgacgggttactttataccacccaccagggaaataagaagatttatgtattcgaccttcaggcaatgcgcgaacaggtggaatggaaagcccaacgggtcattaatctgacctcttattcgccgtacgacattgcatttatcggcaaacgaatgttcgtctcctttgctacaggcaagaatcagcctatcgccctggccgaagtcaatccggagacagggactgtgattaaggattacacaactgtcgaaggacacac

SEQ ID NO: 4660 - DNA, 239 bp, Unknown
  gut microbiota DNA sequence
gtcaccaacacaaccttgccacaaaactcagtcatcacctcctccatattgatatgaatttctgaacgacccagcaagtcttcaatcttgatagggcgtacccattggtggaaacttccgttttcgtcagcctcactgatactcggagcaatcaacgttttcaatccactccttttacaatactgaagcaggcggtcttcctcttcacgggtattctcgtaacgggcaaacaggatgcc

SEQ ID NO: 4661 - DNA, 2081 bp, Unknown
  gut microbiota DNA sequence
aatacgtatttttgcagaaaatcaagtagaaagaaaaatggaccataagaaacctatcatactaaacgacctggaagaatgggattttattgactatatagactcattgatacagaaggaggagactgtagacttagagtttaagatagccaaagatggtcttcctaatagtttatgggatacttattcttctttcgccaatacagatgggggaattatcgtactaggtgtcaaagaacacaagcaacagtttatcattgaaggactgaccaaagagcaaatcggccaatacaaaaaagacttttggaaccaagcaaacaacccggattgtataaatgaaaaccttcttgtggacaaagatttgtatgaaggatcttataaaggtaaaaggcttcttctgatttacgtcccccgggcaagtcgcacacaacgtcctatctacagaaccaaaaatccttttggcggacatacatttaagcgtaatcacgaaggtgactataaatgtacggatgcagaagtcagacgcatgattgcagattcagacgaaagccatccacgcgattcaagaattctgtccaattattctatggacgatattgacaaagagacactgattcaatacaggcgactttttgctaaccttaagccatcccacccatggcttagcttagatgatctggacttcttaaccaaactggaagcataccgcagagaccgacataccaaagaagaaggattcacattggctggaattctcatgttcgggaaaacagaaagcatcacagatccggaatgtgcgccaaactatttcccggattatagagagcatctggaaacggatatttctctcagatggtcagaccgtatctgtccggacggcacttgggaagccaacctttttcagttctaccgtaaagtatatcccaaactgacagccatattgccaaaaccttttcaaataaaaaatggaatacgcattgacgaaacgcctacccatatcgcagtacgtgaggcatttatcaatgctcttattcactgcgacttctcagaagaaggaaatattgtcgttgaacaatgggtcgataaatatcgtttcaaaaaccccggaacaatgcttgtcagcaaagcacaatattatcaaggaggagatagtgtatgtcgcaataaggcgctacagaaaatgtttatgctgatcggcttttcagagaaagcgggaagtggagtaaataagataataaaaggctggagagaagctaactggcagaaaccatatgttgaagaattcaatcgacctgacaaagtagaattaaccctacctatgatcagcttattaccggatgatgcggtaattaaactaaaggaactatttgatggaaaggttgagagcttgtcacaagatgagctaacagctttagtgacttgttatagcgaaaacgaaattagtaacagccaactgcaatatattgtcccccaacatcgttcggacattacaaagatgctgaagaagctttgtaatgaggggttcttagtttcaaaaggaaatggaagaggaacaaaatatcatgttaatgagccagaaggaaaagttagaatctcagaaagctgctcagagagaaaggttgagagctcagaaggaaaggttgagagctcagagagaaaggttgagagctcagaaggaaaggttgagagctcaggacaaacaaaaaagagattaagttttgaagatttgcaagcacagataattactatagcgcaagattacgtaacaatggaagaaattgctataaatactcaaaagaaattgcaatatcttgttaataaaattattccgagaatgctacaagctggaacgattgaaaggctttaccccggagtgcccagccatcctaaacaaaaatataaggcaactaataagaaccataaataagcaatacgagtacactgccaatacagcttttttcataattctattattgttaagtatgtgattaaaggcaaaagtaggcttttttccgtatttttgcagcgaaataatcatttagttcatcatatacatgaaaatagaccatatagacctggga

SEQ ID NO: 4662 - DNA, 1081 bp, Unknown
  gut microbiota DNA sequence
acctgtttttcaagaaagcccatgagataggcccgaaagatgcagagccctatctgattgagggaggtatgtatatggaaaaaggagatttcgacaaggctgtaaagaaatgggctttggctttagagtgtgccccgtgtgccgatacttggaatgaaatcggcatgagcagcatggaaacgggccatatacaatatgcccaaacggcttttgagcaggttaagaaactggagcccgacttcgagaatatcaacgagaagctgaccgccctttatctgttacttgacgacatggagaacttcctaaagtacaaccagctttgcgcacacccgtttcaggcaaaagacctggaaaacatgctggatttgctggattgtaaaaaccgggatgaaatgataaaaagagtgaaagagatatttggcgggtcaggtttattttaaagacataaacaaattattaatcacaagtattatatatggaatcatctgcagaacttatcaaatgggttttagaaaatctgaattattgggtagttaccatcttcatgactatcgaaagttcatttatcccatttccatcggaagttatagtgccgcctgctgcatggaaagcgatgaccgatgacagtatgaatatcttccttgtcgttattttcgcaactatcggcgcagatctcggcgcactcataaactactatcttgcacgttggctgggtcgtcctattgtctataaatttgccaacagccgtttcgggcatatgtgcctgattgacgaagcgaaagtacgccatgccgaagagtacttcaggaagcatggcgccgtatccacattctttggacgtcttatccccgcagtacggcagcttatcagtattccggccggactcgccggcatgaaattagggccgttcctgctttacacaacgctcggtgcgggaatctggaacacgatactggcgctgctcggctattttatataccggttcacagacatcaagacaaccaacgatgtctatatattggctacggaatacagccacgaaatcggttatatcattctggcggttgcgatattcgttgta

SEQ ID NO: 4663 - DNA, 2437 bp, Unknown
  gut microbiota DNA sequence
attacgcaggggggaatgatcgtacaggctgtctatataggcagaaagatgttgagggtaatgcttttctacctttttcaatgctgtggagtagaaaatagaatctacgtgatccagataataagccaacatctttttcatgatatatttgtcgtcttcaggtctgaaatcacgatagaatgctacggtaagcggtttcagtttgcggatttctcctttcatggcagtctttacattcttgctttttctttgttccatttgcaccagtttttcaaattttccggcaaaagggatgacgttggcaccgtaaagtgcgacttcgcgaaacatctggtctgtgaagttcagttgggtaagacgttcgtagtttgctttcatatcatcgagcaatgttgccccgtagcgttgcgtacgggtgtcatcagacagaatccattctgtcatcgcctgttcctcctgctgtttccgggcaatgatgccggattctttcacaccactgatctcaccaattgattttagatagacattagcagcacttccggccttaatgttatagtaggagtaaagcgagtcggcagccgtttctttacgttgtgtgtagaagtcgagcttgattttggcaatatctgcttctgcttgcgtgtctttgaatacaattttctcaagggcgaacgaagggacatattgccttgtttgcgcaggatatccggcaaccatcacaaaatcatcgggcttcactcctttggtagagatagacaaatgagcgtcgggttgataggggcggttctgcttgttgtaggctgccggttggtttttatcgttggcataaacgcgcaagatggcgaaatcggcggagtaacggggccattgccagttgtctgtgtcgcctccgaatttccctatcgagatggggggagcggctacgatacgcacatccttgaagcagcgaaagacagccaggatgtattgtctgccaccaaataaggagtagatttttccttctacaccgcggcctttggcttgggatttgacaattttattcccgttctcgttgatcttttgggtaagtgcctgatcggtaagatttccggtatcttgtgtgatttctgtcgttacgtctttgatagtgattaattgattgacctgtaaattcggaagataagtctcttcgctgcgttgggtagcccagcagccatgcttcacgtaatcgtggtttgcatcggagatatgttcgagataacgtgcgacacagtggaagttggtcaataccagtccttcaccggagatgaaagaggcactggcagagggagaaaatgtactgttgtcataacttaatgaaaggatagcattcgacaagcacgactggttgatgtcgtaaatgtctttttcactaagacgcaatccctgtttcttcattgcctgatgtacttttccttgtatttgagtaggtagccagaagcctccatcggcatgcacgggctgtatgcacaacaggcagaggaggtagaaggcggaaataatggtagttagcttcattgtattttgttttttaaataattattccaggtagaaggattagttgttaactgttcgcggatgcgggtaagatgctcgctgaccgtcggggagaagagtacgctgaaagaggaggtacgtgcttctgttagcaatgattgcaaggtctggagatagctttcctgcaaatgtcgtgtgaatatgtccggtgtcttgtccgtaaaaagatagttggcagagacttccagataatgggcgtaggtaaatcctgctggtgtttcgttcgaagagattcgttcggcaatgattctgccaaacatcttttcaataattgtcttttgtgcttttatgatggcttcggttgggttgccggcatatttgcatacggcatccgtccgtaggaagttgtatccgccaagcagttctttccaaagaaattcgacagcttttccggatacttcatcggagaaaccaataaaaggaatcacacgttccagatggtcgaaataggcttgctgcaaatcggtataggtggcgggcatctcctcaaacgggttatctgtcagacgttttttgttccattccggcaattgcgtcaatatttgttgaaggttgcggattccgtaggttgccgatgcgacagggtcgttgccgagatcggaggtttgaacggtaggatcagtggggatagtgctcggtgccatgcgtccgcaatgatacatgggatcgttttgtttttcatctatccatccggctacagttcgggtgttctcgcgggagagataggcgtatccgatacggatggcgtatcggtcgtacacccccaacaggggaggtaatacgtaacggacgccgtctcccggttgggcgacataattgaaccgggcataatccatgatggacggggtggtgccgtaacgtt

SEQ ID NO: 4664 - DNA, 15597 bp, Unknown
  gut microbiota DNA sequence
tatttttgcaccctgttttaacatccaagaaaacttaaatagaaaaatataatggcaaaagaactgaaagaccttaccaaacgtagcgaaaactactcacagtggtataacgatttggtggtaaaagctgatttggcagaacagtctgccgtacgcggatgtatggtgattaagccttacggatacgcaatttgggaaaagatgcaacgtcaactggacgatatgttcaaggaaacagggcacgtgaatgcttatttcccgttattaattccaaaatcattcctgagccgcgaagcagaacacgtagaaggtttcgctaaagaatgtgccgtagtgactcattaccgtttgaaaaatgcagaagacggctctggcgtagtagtagaccctgctgccaaattggaagaggaactgattattcgccctacatcagaaacaatcatctggaatacatataaaaactggattcagtcttatcgtgacctgcctattctttgtaatcagtgggcaaacgttttccgttgggaaatgcgtacccgtcttttcctgcgtactgccgaattcctgtggcaggaaggacataccgctcatgctacacgcgaagaggcagaggaagaagcgatcagaatgctgaatgtatacagcgaatttgctgagaaatacatggctgttccggtagtgaaaggtgtaaaatccgctaacgaacgttttgccggtgcacttgatacttataccatcgaagctatgatgcaggatggaaaagcattgcaaagcggtacatctcatttcctcggacagaactttgccaaggcatttgatgttcagtttgtaaataaggaaaataagatggaatatgtatgggcaacttcatggggtgtttctacccgtttgatgggtgctctgattatgactcactccgatgataacggtctggtattacctccacatctagctccgattcaggtagtaatcgttcctatctataagaacgacgagcaactgaaacaaatcgacgcgaaagtggaaggcattgttgccaaactgaaagcactgggcatttctgtgaaatatgacaatgcggacaacaaacgtccgggcttcaaattcgcagattatgaattgaaaggtgtccctgttcgtctggtgatgggaggacgtgacctcgaaaacaatacaatggaagtaatgcgccgtgatacactggaaaaagaaactgtgacttgcgatggcatcgaaacatacgttcaaaaactgctcgaagaaattcaggcaaatatctacaaaaaagcattggattaccgcaattctaaaatcacgacagtagatacttacgaagaatttaaagagaaaatcgaagaaggcggctttatcctggctcattgggacggaacaaccgagactgaagaaaagattaaagaggatacaaaagcaacgattcgttgtatcccattcgattcgtacgttgaaggtgataaagaaccgggaaaatgtatggtaacgggcaaaccttctgcttgccgtgtcgtttttgcacgttcttattaaaaacacatatctatttcaatagtaaaagagtcagattttcaaaattgagaatctgactctttttttatccatttcagttttatttcagaaatatcccttttctttgtagacagtaataaagaaaggagaagattttatgaagatattaattgtagaagatgaaccctctttaagagaattgatccaacgttcgttggaaaaagaacgttatgtcgtagaaacggctggagacttcaacagtgcattatacaaaatagaagattacgactatgattgtgtcttactggatattatgctgccggacgggagcggtcttgaccttctcgaacgtttgaaagctctccacaaacgggaaaatgtgattattatctctgccaaagattcgctggaagacaaagtactgggactggaattaggagctgacgattatttgccgaaaccatttcatctggcagaattaaatgcacggatcaaaagtgtgatccgtcggaatcaacatgatggagaaatctatatccgtcagggaaatgtaaggatagaacccgacaaataccgggtgtttgtcaacgaacaggagctggaactgaacagaaaagaatatgatatcctgctttatttcataaatcgtcccggccgtctggtcaataaaaacacactggcagaatcggtatggggagaccacatcgatcaagtggataactttgacttcatttatgcacaaatcaaaaatcttcgcaaaaaattgaaggatgcagaagcaaatattgaaatcaaggccgtttatggattcggctataaactgattgtagaataatcgaaaccagaaaggatcatccatgaaacttatatattatatcatttttcgcatcaccctcgccctgactcttatcctgactgtctgggcagtctttttctatgttacaatgattgacgaagtcaacgatgaagtggatgattcactggaagactattcggaaacaatcattatccgcgcattggcaggagaggagcttccctccaaaaataatggttccaataatcaatattatctgaaagaaataaccaaagaatatgcaaagagccgggaagatatccaatataaagactccatggtatacattgtagaaaaagaggaaacagaaccggcacgtatcctgaccactatctttaaagatgacgaagaccgttattacgaattgaccgtatccactcccagcatcgaaaaagatgatttgaaaagtgcgattcaagtctggattattttcctgtatgtagctctgttactttgtatcatcatcatatccgtatgggtattttatcgtaatatgcgaccactgtatatactacttcattggttggacagctatcagaccggaaagaaaaacaaacctctgaaaaacgatacacggatcacggaattccgcaaactgaatgatgcggccacccgttacgtagagcggacagaacaaatgttcgaacagcagaagcagttcattggaaacgcctcacatgaaattcagacaccgcttgccatctgccgcaatcggttggaaatgctgatggaagacgattctttgtccgagaaacagcttgaagagttgatgaaaacccatcagacactggaatatatcaccaaactaaacaaatccctgttgctactatcaaaaatagataacggtcagttcactgacaccaaagaggtagacttaaacgtactcctcaggcaatatctggaagactataaagaagtctacagctacaagaacatagaagtaagtataacagaacaggctaatttccatataaccatgaacgaatctctggctattgctttactaacaaacctgttaaagaacgcgtttgtacataacgtagacgaaggacatatccggattatcataaccaaacatagcatcaccttccgaaattccggagagaagcaaccattggatgagactcacatctttgaacgtttctatcaagggcacaagaaagaaggatctaccggattaggattggcaataaccgattccatctgtcgtctgcaacagctgaacttgcgatattacttcgaacaaggagaacattgtttcgaaatctccagtaagaaccagagataaaacaattaataaaacatctgccatccagagcaagacaatgtgctggatggcagaattaatagggtactacctaagattacaccttatgacagtacctgatttggattccgcatatatgattatcgggatcggatttcccttctcataaacataatatacgagattgcaaagcagataacagtcgctgcaatcagccccgtgagctgtggccaaacaacaagcagactctgtcccaacggcagcggactcggaatagccccttgtacctgttccatcgtaagcggtccgatacttctgacagaaggcatcagcagcgttgtagtagcttcattaaacaattcactgggtgccagacgcattaatccaagaataaatttctgataactgataatctgataaggagacgccatctgcgacggacttaatccttttgccaccaaattgacaatcatcgtatagaatacgctgaaaaacagccaaacggctacggaagccagcgcagaagtagcagcctgacggaaacggagtgagaataagatggccaggttcaaccaaaaggctacataaaagatactcgttataagaaagaaaacgattctccagaattcttcagccgtaggaggaatgccaatggcaatcaatccgaatcccatcaccaaaaagcccagtacaaacagcataatacctatcacgatcaaagcagccacaaacttcgcattaatgatacaatcacgatgaatgggctgagacagcatacggctcaatgtccccttattctgctccgaattgacagcatcgaatcccaaagcaattcctaataaaggacctaaaaagttaataaacagcacaaaggaggggagagtcccatccgaagctgtgaataacttcaagaagaggaacgaactgtccggatcatccggtttgatagccgcaccgatattagtaagcgccgtgtatagcgatcccatacaagtaagtgctatgataccgatcagaataagaaaacgccagcttttgacatgatcggatatttccttatgtacgataacccaaaaaggatgattgactttactcatgcccttcgcctccttcctcaaaataatggttataaatatcagacaattcctgtttcttttctttcagctctgccatatcaatcagagcaagtattttgccgttactgaacaatcctactctgtcacatactttctgtgcctggtccagatggtgggaagaaaacaaaaccgtcagcccttcctctttgctcagccagcgaatcagttcaataaactcctgaacacccgcagggtcaattcccgaagtcggctcatccagaataatgatttcgggattcttaataagcacatcggccagaccaagacgttgtctcataccgcgggaatactttccggttttctttttcagctgatcttcaagccctacgcgcttcatcagctccagtgcttttactttcgcctccttgtcagggataccgttcagccgtgccgtatacatcagattttccagacctgtcatgtcatcatagaatcccacatcttcgggcagatagccgattttccttttcacttcaataggatgagtggtagaattaattccacaaatctcgacaattcccgatgtgggctccgttaatcccagcatcatcaaaatagtagttgactttccggcaccgttcggacccagcaaaccgaagatttctcctttccggatactcaggcgaatatgatctacagcagtaaatttaccgtattgtttggttaattcggtaagtacgatcacttgttcgcccataatttacctccttccatatttacggaacagatagtagacaacaccgatagtagccagaataatcagaacacctacccatccccaaatcatcggagtctttacggcaattctgaactgcgcatctgcattcacttccggagttttggccatcatcgtagttacataatcacccggaagcgctttcttagatgctttcaagatggctacaacagtagccgtttctccggctttcagcatttctatctttgacggttcgaaagctacatcccagtcaaccggcttgttggcagacagttggatatctttcaataaagaagaacctgtatttttaatttccagttcgattcgtttggtatcaccggcagtcacatcagaacttaataatcctctcggggtggtcagttccatctgataagaaccggtgacaactacttccagttccagttcggccgaagtattgcctgtagcggcacgtacgggaattttataactgccagcttccacattggcaggaggagtgatgtctatacttacattctggctgctgttggcttctacttgtgcggaagttgcctgcttataattaggtttgaaaataacattccagcctctgggtgctttagccatcaacgcatatagttgctgatcggcagtctgattcttcaatgtggcattaaaagtgaaagttgatttggaatttccctgcatattgggctggtcggtggtaaactccgtctgataagtaccttgttgtgccacaacgacattcaaagggagttgcgtttctccggcagacactacaaaatggtagctgcctctgcttacttttaaaggaacatctacttttaaattaaaagtcttcttttctttagggagtacggccaactgactgagattccaaccaccggatttcatttcatgtttccagctgcttgatagggcactgacggaaagattggcattcaccaacttgtctgtgttgttaatcaggtcgatgctgtagtcaatagacgcccccggtgaaacggagattttagtgtaaggtgtgtacaaaatcacgcttttaggtatagagtcgttagcgtgtgtgttactcatggggagtattcccagcaaaacagttaataataaaaaacaatttgttctcatagtcatacgaaagttcttatggttgatttaatatgaatattgtcaaatttgtgcctgcaaaaataagcgatgaatttattagttgctgttaaaagaaacaaaagaatacaataagaaagatttcctttgtttttttcggattttgcccaaaattcccaaatcttttcagattctcctctcatctttgcattataaattaaatgataacagtaaaaccaattaaaaaaacaatgattatgaaaaagttagtattcttattagtatgcttgttcactttacagacagtagcacgtgcagatgacgataaacctatccaggtgactcaaatgccacaattagcacaacagtttatcaaacagcatttctctgacagcaaagtggcactggcaaaaatggaaagtgacttcctttacaaaagctatgaagtgatttttacgaatggtaacaaagtggaatttgacaagaagggaaactgggaggaagtagattgcaagcacacctccgtacctgttgccattattcctgccgccatccagaaatatgtaacaactaattatccggatgcaaaagtgctgaagatagaacgtgataaaaaagattacgaagtaaaactatccaaccgtacagaactgaaatttgacctgaagtttaatctgattgatattgataattaactttcttaaaatctatgacaacaatgaaactcaaaatttatacactactgatagcattctgtgcagcatggagcctgcacagctgcgataacgatgacgatgaatcaatcgctgttcctaccgcattgcaagaagcattctcgaccaagtatcctaacgtcaagaacgtaaagtgggaaacaaaggcaggatattatgtagcggacttctatgatggatatgaggcatccgcatggttcacaacggatggcaactggcatatgactgaaacggatatcccgtacaccgcattgcccgatccggtaaagagtgcattcgaagcaagtgactataagacatggagaagagacgatgtggataaacttgagcggcaaggcatcgaaacagtctacgttattgaggtggaaaaccagaatcaggaagtcgatctgtattattctgttgatggagtgctgattaaaagcattgcagacacagacgctcatgaaaacgagcaccttccgaccactcaactgcccgctgccatgaagactttcattgatgggaaatatgcaggagcaagaatcatggaagtagacgtggaagatgacaaaaacgactgggattttggatttacggaagtagatatcatccatttcgacagtggcctgaaccgcaacgtttcaaaagaagtactatttgataaaggcggagagtggtattctacctcatgggaggtacggagaaacgaactgcccgccgcagtgaccaatatcatcagcgttgagtatgcagagtatcagatggatgatgccgaatactttgagatggcaacaggaacatcctattatcaaattgaactggaaggaaataattctccggatatagatattaaagtaaccacagacggtacgattctcaaataaaataaaatagtgacactatcggttatggtatagtgtcactatttatttttattcctgtgcccgctttctctttagctccgacttagctttatcatcggcaatgctgtctgtctgctgctgttgcaccttttcggcttcttcacgtttccgcttgctgcgcagtttccatttattccagaagaaaaggtcactccatttattgaaatccttcttatacatgataccgactccctgcgtagtaaggtttgtctttgtgtagtaacggtcatttgtttcattataagccttcagacgaatatctcccgaacggttgatcagccattcagcttcgaagtcgcctataaagttggtattcgccatcggattgtcccgatagccgaaattaccattaaccaacaggcggttgttcagcaactgaccggacaggataccttctacttccatatccgtccatcccttatcacccgtgctcagattggtaccgatattccagttattagtctcaaaaacctgagacaaggcattattcaactgaccggacagggtagaagagagtaccgatgacatcacgttcgagttctgattgttccgtgcagcatcttccgtatagaacttaccgatacccagcagataaagaatctgcatattcatctgctcttccgtactgatataattgcgcaccaacgtctgaatttcatctctttcattcggaagctcgatacccagcttaatggtcggccgcagtaaaatcccgctcagattcatgatacagtttacccgtacattagtctgctgggcaatggaggaaacatccggattcaagtcgttcaatgaagcggaattcaccgtgtatgaagcctgaatatccatattcgcatccaaaggagcaccgttgaaagtaatcgtacttccatctttgatgataaaatctttgcgaatcacttcctgcaaactgaacttatatattccctgactgatccggtaattaccgaacatcttcacatcccctttattataaaactccgtgcgtatgtttcctgttcccttcgcactgatgtagtctccggctatagggtccataataattttcatggtggcatcgggtgtagcatctactagaatattcaaacgaatatctgtctgatgctcttcttcgtccgcctgacgcttctgttgcatctgctcaaaataggaatttacccgaatggaatcctgaatgtttcgacggggcgttttatctacaaactttataaactgggtgctggcagccgacgccacatttccgttgatataggtgaataccgtattccggttggtcgtcatggcgagatttacgtccagtccctgtatcgcattccctgcaagcaacgcatttcccgtagcatataccgttccaaagaatggcatatccgtcgattccttcgtattcatcaagagcatattattagcctgtatctcaaaacggtaatttatattcttgaaatgctggaaacgcagatacccgttcaaggttcccgaatgcccttccatatcggcaatatgcatattattgaatttcaatccggtaggagccaaatgaatcgtatctctaacggcaaagtgggtattcagaatatcaaacttcatggaagcatccgtcataacagccccatccagattcaatcccttgaactttccgtaaaaatgtacttttcctgttccccgtccttttatatcctgtgctattgatttcatataaaattcgaggaacttcaagttcagttcatgggcatcgatattcagatcgagtccgctttccggtttcaacgggtagatcataccgatgactcgcgatggtgacggtgatatatcctgaatggaagcatccagatagattcctcttttctcattatcccaggcgccatatacgttcaaatcacctaaacggccctgattgagcgagaagttcttgacgaagaggcgggtattcatcacaggtttcttgaacacgctgctggcatatgctgttcccgtagcatctccttcaaagtttacgtcatcggatatgtttgcaatatcaaatacgtatcccatattaatgtctttcaggtccacttttacggtatctgccggattgtcggaaagccgcccattgatacgcacataacggtcatgatggctgaaatagaaattattcacatccaccttgcccgagtccaccactacctgcgaaggatgtatctgccaaagtgtatcattcaagataacgtctgtctgtttcacatccaccatcgctttcagcaaaggcttttcacctgctgtacgcaggaattgtgcaacagccgccaactttccgctataagttgctatggcattatttccccagttcagagtcgtgctgactttatcttctttggcctgtgcttccagagaaagattcacggctccattctttttcagactggtcagccgcaccttcgcactgatatggtccgaaggattctcgcacaagatcatacccgactcgataaagttgtttttatattgcaggcgggggaagtagccttccacacgtagccgctgcaaggcatcattaaaataccctttcaacgtagaatgtgtatatacagtcaacggaacatcaaatatcgtagataaaatgtccgtattatatatatgtacatcaaacgcaaaattattgttcgtctctatcggtttcttcggaggcaatatcaaggacggcacataccgacgcatgatattgaaaatacttgccggtaaagtatggtactggaattttcccgctatgtttgccgtcagaaattcagaagtcagtttaagctgattttcattatcctgccgggtagcccgtacattcatgttcttcatgaaatattccttgtccggtgccctgaactccagactgtccacattgatttctccaatcatctcgtcaatggaacctccggtaaaattagcttttaccttcagagagaactccgcatcctggtaatcaggtgtaagatttaaatcattaggacggaacttgtcgacaacggcaaggaaattgaaagtaggaaccttggatgtcacattcacatctccgttcagataaatagacccattcggatcatccagcgctatctttccgttaaatccgccttgcttgtattcgccgtccagcgtaatattctcatatttatatctgctatattccacagatgcgatcaatcccttcaactctacagcaggaagctgtttttcgatatgccgtccatgtacatcaagattaaaggtgatttccccaaatttctcattattcaataacttgcccagttcaaactcttctgttttgacagcaccggaataagcaaacagccccttagccttatcggaacttaactttaagtcggtttttacattaccaagccctgtacgaagctgtccgtaagtaaccagatcggtgaagtatccggaaatctctccacggaaatcaatatcccccaaacgttccagaaggggaggtacaccattgtaattgctgctcagattacgcaccaaaaaaccgacaccacgattgttggcggaaagttcggaaagcttcccgtacacatacgcatcctgcggactcgatagttcctgaagcgatacatcccccgatagccggaactggcggtcgtcggccgtaatctccagatgagagcaggtgagctggtcgaccgttcccttcacctgcatatccagcgttatcggttccttgaaatgcgccaatacaggaacaaaaggggaaatatctttcagagtaatctgcgagggtaacgtacggaaagaaaagtggaccttctccgagaactgatcaaaagccttcagactgtcatacaccaaatgaatagtatccatcttcagtgaagtttcgggcaactcaatggcaaaattctctatattagtccgtttatcattggcaaccaatttcagactcatcttctttaaagagaatccggaagccttttcatcgaagctcagacgcttgataccaagattcaaagaatccctgctcatcgccttcaatgaaatattggctataatattctgaagctggacatgcttggcattaaactttccgggagtcttttcctctgacaatacatgataagccatccttccccgacgaatcaaaacggaattgatacgcaaatccagcgaactttccttttttacagtgtccttggaagcaaaagcatccaatacgaacttaaaattcggaggagagtcgggagtctctttattcagattgatggtaaagccgaataactggacactgctaatggaaatctttcccttaaagaaaggaaggatatcaaacttagccgataagcgggttactttgagcatttccttgccgctctggtcgtcaagcagcacatcatcaatgataatacggtttaatagaccgatatttattttgccgatagtcaggcgtgtattcagcacctcggacaattccttggcgataaacacactcattgctcgctgaacatttggaatattcagcaaaacaatagttccgatatatactcccagtacaataccaactacccagcgtacagtctttttcagcgttctgataagcgataacttttatttagcgaacaaaaatataaaatagttcgttatgaatcgtagttttatcattacttttgcaccgtttaatagtttaaaaacatatgagtgcaataatattaggaattgaatcctcctgtgatgatacgtcggcagccgtaatcaaggatggttatctgctgtcaaatgtggtatcaagtcaagccgtacacgaagcatacggcggagtagtacccgaattagcttcacgggcacatcaacaaaatatcgttccggtggtacacgaagcactgaaacgggcaggggttaccaaagaagaactgagtgcggtagctttcacacgtggaccgggattgatgggatctttacttgtaggcgtctctttcgccaaaggattcgcacgttcactcggtattcctttgatagatgttaatcatctgacaggacatgtcttagctcattttattaaagcagaaggagaagataatatccaaccgaaattcccgttcctttgcctgttggtatccggaggaaactcacagattatattggtaaaagcctataatgatatggaaattctcggtcagacgattgatgacgctgccggagaagcaatcgataaatgttctaaagtgatgggtctcggatatccgggcggaccgatcattgacaaactggcacgtcaaggcaatccgaaagcgtttactttcagcaaaccgcatattccggggctggactacagcttcagcggactgaaaacttctttcctatactccttgcgtgactggatgaaagacgatcccgatttcatcgagcatcataaagtggatttggccgcctctctggaagcaactgttgtaggcattctgatggacaaactgcggaaagctgccaaagaatataaaataaaagaagtagccgtagccggaggagtctctgccaataacggattgcgtaactctttccgagaacacgctgaaaagtatggctggaatatttttattcctaaattcagctatacgaccgacaatgcagccatgattgccattaccggatacttcaagtatctggataaagacttctgctccattgatcttccggcttattcccgtgtcacattataaaacagttttttaccgtcatcgtcactttatataataaactattgtcatagaataatttaagtagtgacgattaaagtgacggcaataacaatagtgacggcaaacgccgaaaaaatgtcaccgacccaataggcggtggcataaagaagccttgctgaaaacaaaatgcacctatatataatagggagacaaaggaggattaatgatataagaagccttcattaagaatctttgtttatagcattccttcgttccacgtgcgtaagccgtccagttcacatacgtgatccattcggctcacgcacatgaaccgaatggatcacgtatatggaacgaaaaaatgaagtaaacctaatgacttaacatagcgtatataccttattaatataggtagcatattctattaactaacgcaggaaaaagatgtttgctgaagttattaccattggtgacgagctgctgatagggcaggtagtcgatacaaattctgcctggatggggcaggaattaaataagataggtatcgaagttctacgcattgtttcgatccgtgatcgggaagaagagatcatggaagcagtaaataatgcgatgaaaagggtgaatatcgttctggtaaccggaggactcggtcccacaaaagacgatatcaccaaacaaactctctgtaaatacttccataccgaactgatattcagcgaagaagtatttgagaacgtaaagcgggtgcttgccgggaaaataccgatgaatgcgctgaataagagtcaggcaatggttcccaaagattgcacggtcatcaacaatccggtaggaagcgcttctgccagctggtttgagaaagacaataaagtgctcgtatccatgccgggtgttccgcaggaaatgactgccgttatgactgagtccgtattgcccaagctacgtgagaagtttcaaacggatgtaatcatgcaccggacctttctagtacaacattaccccgaatccatactcgctgagaagctggaaccgtgggagacagccttgccggaaagcatcaaattggcatatctgcccaaacttggaatcatccgcctgcgactaaccggacggggacagaacaagatagaagtggaaagcgcactgaacgacgagcaggctaagctggaagcgatactgggcgatgatattttcagcgaagaagatatcccactggaggtaatcgtaggcgaactactgaaaaagaagaatttaaccgtttccaccgcagaaagttgcaccggaggaagtattgcggcacgtctgacgtccattgccggaagttcggaatactttaatggaggaatagtggcatattctaacgaagtgaagatgaatctgctccatgtttcaccggaaacactggaagtgtatggcgctgtcagtgagcagactgtgatcgaaatggtaaaaggagcgatgaaagcgctgaaaaccgactgcgctgtcgcaacttcaggaattgccggtcccggaggtggaacaccggagaaaccggtaggcactgtctggatcgctgctggttataaaaatgaaattcgtacttacaggcaggaaacgaaccgcggaagagccatgaatattgaaagagcgggcaataatgcgctattaattcttcgtgatttgctcaaataaggaaaaattggtg

SEQ ID NO: 4665 - DNA, 30066 bp, Unknown
  gut microbiota DNA sequence
tgtcgaagatttgtcaaattaccggaaagaaagccatgattggcaacaatgtttcacactcaaagagaagaacaaaaagaacctttgatttgaacttgtttaacaaaaagttctattatgtagaacaagactgttggatcagccttagcctttgtgctaacggtctgcgtatcatcaacaaaaaaggactggacgctgcactgaacgatgcagtagctaaaggtttctgtgattggaaaagcattaaagtaatcggctaaacgtagaggagaaaacttacaatggcaaagaaagcaaaaggtaacagagtacaggtgattctggaatgtacagaacacaaagagagtggaatgccgggaacatctcgctatatcacaactaagaacagaaagaatacaactgaaagacttgagttgaagaaatacaacccgattctgaagagagtaacagtacataaggaaattaaataataatagtataacccatggcaaagaaaacagtagcaagtttgcacgaaggttctaaagaaggtcgtgcttacaccaaggttatcaaaatggtgaaatctccgaaaactggagcttacgtttttgatgaacaaatggttgcaaacgaaaaagtacaagactttttcaaaaaataatcagaatagcataaaacgctataaacacaaaatcccctcattggcaaacagtgaggggattttttattgcttcttttttttacttttccaatcctttgttatatctttgtagcataatgtattatacaaataactgtagatatgggattttttagttttttttcaaaggaaaagaaggaaactttagataaaggattatctaaaaccaaagagagcgtattcagtaaaatcgctcgtgccgtggctggtaagtcgaaagtagacgacgaagtattggataatctggaagaagttttgatcacatctgacgtgggggtagagacaactttgaatattatcaaacgtatcgaaaaacgggccgctgcagacaaatatgtgaatactcaagagttgaatcacatactgcgtgatgaaattgctgcccttttgaccgagaataattcagatgacgtagcagactttgatgtacctatcaagaaaaagccttatgtaatgatggtagtgggagtaaacggggtaggtaaaacaacaacaatcgggaaattagcttatcaattcaagaaagcgggcaaatctgtttatttgggtgccgccgatacattccgtgcagctgccgtagagcagttgatgatctggggtgaacgcgtaggtgtgcctgttgtaaaacagaaaatgggtgcggaccctgcatctgtcgctttcgatacactgagttctgctgttgccaacaatgcggatgtagtgattatcgatacggccggccgcttacacaataaagtaggcttgatgaatgagcttaccaagataaagaacgtcatgaagaaggtagtacccaatgcaccggatgaagtcctgctggtattggatggttctaccggacagaatgctttcgagcaagccaagcaatttacattggctacggaggtgactgcaatggctatcaccaagttggacggaaccgccaaaggcggagtagtgatcggcatctccgaccagttcaagattcctgtaaaatacattggattgggtgaaggcatggaagatttgcaagtcttccgcaaaaatgaatttgttgattccctgtttggagagaatgcatgaaaagaaagagaatagatattattactttaggttgttctaaaaatttagtagactcggagcagttgatgcgtcagctggaagaagcaggatacagcgtaactcatgatacagaaaatccggaaggggagatagcggtaatcaacacctgcggtttcatcggtgacgcgaaagaagagtctatcaatatgattctggaatttgcagaaagaaaagaagaaggcgacttgaagaaactgtttgtaatgggctgtctttccgagcgttatttacaagaactggccattgaaataccacaggtagacaagttctacggcaaattcaactggaaagaactcttgcaggacttgggaaaaacgtaccatgaggaattgtatattgagcgtactttgaccactcccaagcattatgcttatctgaagatttcagaaggatgtgaccgcaagtgctcttattgtgctattcccattattacaggacgccatatatccaagtcgatggaagaaatactggatgaagtccggtatctggtatcgcaaggggtaaaggagtttcaggtgatcgctcaggaattgacgtattacggagtcgatctgtataaaaagcaaatgctacccgaattgatcgaacgtatctcggaaattccgggtgtagagtggattcgtctgcattatgcgtatccggcacattttccaacggatttatttcgggtgatgcgggaacgcgataatgtctgcaaatatatggatatagccttgcagcatatcagtgacaacatgttgaaactgatgcgtcggcaagtaagcaaagaagatacgtacaagctgatcgaacagttccgtaaagaagtaccgggtatccatctgcgcactacgctgatggtaggacatcccggagaaacggaagaagactttgaagagctgaaagaatttgtacgcaaggcgcgtttcgacaggatgggggctttcgcttattctgaagaagagggtacttatgctgcccagcaatatgaagactctataccacaggaggttaaacaagcccgactggacgagctaatggatatccagcaaggtatttcagcagaattgagcgctgcaaaaattggtcagcagatgaaagtcatcatcgaccggatcgagggagattattatatcggacgtacggaatttgattcaccggaggtagacccagaagtattgatcagtgtttccagaaaagaacttgaagtcggacaattctatcaggtagaagtaaccgatgcggacgattttgatttatatgcaaagatattaaacaagtatgaataataaggaatttacatcggaactggcagacagactggggtatactatcaaagacacttctgaactgataagttctttattgtctgacatgacacaggaactggaagacgggaatgcgattgcaatacagggctttggttcttttgaagtgaagaaaaaagcggagcgcatttcgatcaatccgtccacgaagcaacgtatgctggttcctcctaaattggtattgacgtacagacccagcaatacactgaaagacaagtttaaataatatatatttcccattatgaatgaaagactgacaattcaagaccttatcgacttattggcggctaaacatagcatgaccaagaaggatgccgaagcattcgtcaaagagttttttctcttgatagaacaagccctggagaatgagaagactgtgaaaatcaaaggattggggactttcaaacttgtggatgtagatagtcgggaaagcgttaatgtcaacacaggggaacgtttccagataaaaggtcataccaaagtatcgtttactccggacaccaatctgagagatacaataaataagccttttgcacattttgaaacggtagtattaaatgaaggtacggtattggaagatacccctatggaagaatccgatgaggaggaaggtgcggtttctgatacagagactgaaatgatcgactctgaaatagcaggaaatgaaaatgccggtggagatattcaggaagaaatacaactggaagaacctgtaatcgaagagcagccgactgctgaagcagtagctgtggctgaagttcctgaaactgacgcgaatgaaaccggtcaacctgaaacagaaccggaactaattgcaacagaagaaccagaagctgaagaattgccggaagtgaaaattgaaccgaaaccggaatctgtatctgaggaagccccaggagaagagcctgtagaggaatcttcggaaactgttttggaacctgacttcagtccggtgacagaggaacctgctaaggaacaatcggaagaaacaattatagaagagcagaaaccagagactgaaacaacagaagaggaggaagagaaaacggttattacagaaaaagcggaagttactgcagagcaaattatagcccaagagcttcataaagcaaatatggagcctgtcactctccaagaacagccggaaatagaacaaccgaaagccacctatactgataaagacagtgataaaaaggaaaaatcagctattccttatttaatagcaactattattatagtcttactactgtgcggaggagctatcctgtttatttattatccggatttgttctcatcttcgtctgataagaatgtggttgatataccggaagttactcaacctgtgcagccggaagcacagctttcagatacaattgcacacaaggatactgtggtggaagcagtccaaccgcaacctgttgtcaagaaggaaccgacagcggaacctgtcaaagcagaaagtaaacctgcccaacaacaaccaacagcttcggcatattcggattccgcatcctacaagataaccggtaccaaaacaaaatacacaattaaagaaggagagactttaacgaaagtttcattacgcttttacggtacaaaagccatgtggccatatatcgtaaaacataacccgaaagtaatcaagaaccccgataacgtaccatacggtacgacaatcgagataccggaacttacaaaagaataaaaacaaaaaacacctattcacccggctcatacagcaatgtatagccgggtgaaatgttacgtaagtacaaaagcgtatgaaagtaccttaatctaaagatttcgcattgttttttaataaaaattagttgcaatcgttaattatatggcgtacttttgggagcgaatttagaagccttacacactggtaagtcttacaccttaattaatgagaattaaataataaaatattaagtatttatggctgaatcaattgatatccgcgaactgaatgagcggattgaaagacaaagtgctttcgttaccaatcttacgacaggtatggaccaaatcattgttggtcagaaacatttggttgaatcactgcttatcggattgctttccgacggacatgttcttttagaaggtgtacccggtctggcaaaaactttggctatcaaaacactcgcttccctgatcgacgcgaaatatagccgtattcagttcactcccgacttattgccggccgatgttattggtacaatggtttacagtcagaaagatgaatctttcaaagtacaaagaggacctatctttgccaacttcgtattggcggatgaaataaaccgtgctccggccaaagtacagagtgccttgctggaagccatgcaggaacgtcaggttactattggtaaggaaacattcatgttgccggaacctttcttagtattggccactcagaacccgattgaacaagaaggtacttacccgcttcctgaagcacaggtagaccgtttcatgctgaaagtagtgattgactatccgaagctggaagaagaaaaactgattatccgtcagaatatcaacggtgagaagttcaatgtgaaacctatcctgaaagcagaagaaattatcgaagcccgcaaggtggttcgccaggtttatctggatgagaaaatagaacgttatattgtagatattgtatttgctactcgtttccccgagaaatacgatctcaaagaactgaaagacatgatcggatttggtggctcaccgcgtgcttctatcaatctggcgctagctgcccgcacatacgctttcatcaaacgccgcggctatgtaatcccggaagatgtacgtgctgttgcgcatgatgttcttcgtcaccgtattggactgacatacgaggcggaagccaacaacatgacttcggacgaaatcatcagcaagattctgaacaaggttgaagtgccctaatctgccgtaatattacaatgcagtaaaaggtagtcaagtgtattttacttaactacctgactacttactactttaactactgtataaatggaaacaagtgaaatattaaaaaaagttcgtcagattgaaatcaagacacgaggactgtctaacaatatctttgcaggccaataccattcggctttcaaaggtagaggtatgtcgttctctgaagtccgtgagtatcagttcggcgacgatatacgcgacatcgactggaatgtgacggcacgattcaacaaaccttatgtgaaggtgtttgaagaagagcgcgaactgacagtgatgttgatggtcgatgtttccggaagtttggaatttggtacggttaaacaactgaagaaggatatggtaacggaaattgcagctactcttgcattttctgctatacaaaacaacgataaaattggtgtgatcttcttttcagaccggatagaaaagtttattcctcctaaaaagggacgtaaacacattctatatattatccgcgaactgattgacttccaaccggaaagccgtcgtaccaatattcgtctcgcattggagtatctgactaatgtaatgaaaagacgctgtacagcgtttattctatctgacttcatcgatcaggataactttaaaaacgctctgactattgccaaccgaaagcatgacgtagtggcattgcaggtttacgataggagagtgagtgatcttcctccggtgggactgatgcgaataaaagatgcggaaaccggccatgaacaatggatcgatacttcttccaaagctgtacgccgggcacaccgtgactggtggataaacaaacagaccgaactgaacgacacatttaccaaaagtaatgttgactccgtatctgtgagaaccgaccaggattacgtaaaggcattgctgaatttatttgccaaacgaaattaatggaatcaaagatgaatagaaatattattctgatagcattgttatgtctgctttctataggtagaactgtggcacagtctgttacagtggaagctaagatagattcgttgcagatattaattggcgaacaggcgaaagtacaattacaagtagcgatggacgccaaacaacgtgctgtttttcctgcttataccgatacactggtgcgaggggtagaaattatagaaaccgccaaaccggatacacaatttctgaatgatcgccaacgaatgctgattactcaggaatacattgttacctcgtttgactcagctctctattatcttccgccgatgcctgtcactgtggatggcaaagaatatagatcgaaagctctggcattgaaagtatattctatgccagttgacacattgcatccagaccagttcttcggacagaaaacggtgatgaaagcgcctttcgcatgggaagactggtatgggctgatcggttgctcatttcttgcattgcctttactcggcttattgatctatctgatcattcgtatacgtgataacaaaccgattatccgtaagataaaagtagaacctaagttgccgccacatcaggctgctatgaaggaaatcgaacgtatcaagaatgagaaagtatggcagaaaggacagccgaaggcatattatacggaattgacagatactcttcgtacttatattaaagatcgtttcggattcaatgcactagagatgacttcttctgaaatcatcgataagttattggaaatgaatgataaagaggcaatatcagatttgaaggaactcttccagacagctgatttagtaaaatttgccaagcatgatccgcaaatgaatgaaaatgatgcgaatttgattaatgcaatcgactttatcaacgaaacaaagcaaccggaagaggagaatcagaaaccgcaaccaacggaaatcacaattatcgagaaacgttctctgcgtactaaaatattattaatctgcggtattgtattcttgtcagcagcattaataggtacttttgtatatataggtatgcagctttatgatctctttgcataatgtggtgtgaatactaaatagtaaactgttaaatcgaaaataaaatggtttttgccaatattgaatatctgtttttgctattattgcttataccttatattgtatggtatatcttgaagcgaaagaaaactgaagctacccttcagatttcggatgcacgggtatatgcgcatactcctaaaagttataagaattatttgctacatgctccatttatactgcgcgtcattgcattggctttgattattgtggtattagcgcgtccgcaaagcactaataagtggcaaaacagcgaaatagagggaattgatattatgctggctatcgacgtgtctaccagtatgctggcggaagacttgaagccaaacagactggaagctgctaaagatgtagcagccgaatttattaacggacgcccgaatgataatattggtatcactctgtttgccggagaaacattcactcaatgcccgctgactgtggaccatgctgtattgctggatatgattcataatatcaaatgtggccttattgaagatggtacagctgttggtatgggagttgcaaatgctgtaacccgcctgaaagacagtaaagcgaaatcaaaagttatcatcttattgacggatggtaccaataataaaggagatatttcgccattgacagccgctgagattgccaaaagtttcggtatccgtgtgtataccatcggagtgggtacgaatggaatggctccatatccttatccggtcggtaatacagtacagtatatcaatatgccggtggaaatcgatgagaaaacactgactcagattgccggtactaccgatggtaactatttcagagctacgagcaactcgaaactgaaagaggtatatgaagaaattgacaagctggagaaaacaaagttgaacgtaaaagagtatagcaaacgggaagaagactatcgctggtttgcactggctgctttcctttgtgtactactggaagttttattgcgtaattcaatactcaagaaaattccgtaggaatgtttcgtcaatcgtgatttgtaacgtaaaataggaagaagatgtttcgatttgaagaacctgcatatttatatttattgctgctattaccgtttttagcagctttctacttgtattccaattacaggagacggagaaatatccgacgttttggagatccggaattgttagcgcaattaatgccggatgtatctaaatatcgaccggatgtgaaattttggctcatctttgccgctatcggcttattctcagtattgctggctcgtccgcaatttggttccaagcaggaaacggtgaaacgtaaaggggtggaagtgattatagctctggatatatctaattctatgctggcgcaggatgtgcagcccagccgtttggaaaaagccaagagattaatatccagattggtagatgaattagataacgacaaagtcggtatgatcgtatttgccggagatgcttttacccagctaccgatcacgagcgattatatttccgccaaaatgtttttggaatctatcagcccatcgctgatttccaagcagggtacagcaatcggagaggcaatcaacctggcaacccgcagttttactccgcaagaaggagtgggacgtgctatcattgtcatcacggatggtgagaatcatgaaggtggcgctgtagaagctgctaaagctgctgccgaaaaagggattcaggtaagtgtgctgggagtaggtatgcccgaaggtgctcctattcctgtagaaggtaccaatgattatcgccgtgaccgcgaaggtaatgtaattgtaacccgtctgaatgagggcatgtgtcaagaaatagccaaagacggaaagggtatctatgtacgggtagataattctaattctgctcaaaaggctatcagtcaggaaataagtaagatggctaagtctgatgtggaatcgaaaatatatacggatttcaacgaacagtttcaggctattgcatggatcattttactattgttactagctgagatgttaattttggatcgtaagaatccattattcaaaaacgttcatcttttctctaataagaagtaagctatgcgtatgttaaaaatgaaatatatcctgttcgctgcttttctgttattggctgttggtgtttcggcacagaaagcagagcgtgactatatccgcaaaggaaatcgtctgttcaatgatagtgtattcgtagatgcagaggttaattaccgcaaggctttggaagttaatcctaaatctgctgtatccatgtacaatttgggaaatacgctctcacagcaacaaaagtttcaggaagccatggagcaatatgattctgccagcaaaatagaaaaggataaaatgaaattggcacacatttaccataatatgggggtgctttttcaagctggtaaagattatgcaaaagctgtggatgcctacaaaatgtcgttgcgcaacaatcctgcagatcatgaaacacggtataacctggcactcgctcaaaagatgctgaaagaccaacagaatcagcaggatcaagatcaaaatcaggatcagaataaagatcagcagcagaaacaagaccagaaacaggaccaaaacaaagataaacagaacgatcagaagaaagacgatcaaaaggatcagcaacaaccgccgaagcctgaaaaacaagataatcagatgtcaaaggaaaatgctgagcagttacttaattctgtaatgcaagatgagaaagacgtacaggacaaagtgaagaaacaacagaaggttattcagggcggtcgtctagaaaaagattggtaataataaaaagttgatgatataaatttcataagcaatgaaaaaactgattgttatattgatggcattgatagcatatagcacccaagcgcttgccgacaaggtgtcattcactgcttccgctcccgatgtagtggtggtaggggatcaattcaggctatcttatacagtaaccacacaaaaagttaaagactttcaggcaccgtctatcaaaggattcgacgtcctgatggggccaagccgttctcagcaaagcagtacacagataatgaatggtaatgtcacctctacaagtagtattacattcacttatatattgatggcaaatactgccggtgaatatacaatccccggagcttctattgtagctgatggcaaccagatggtttcaaactccgtaaaggtgaaggttttgccacaagaccaggctggtaatggaggacaaaatgacggtagctcatctgcacgctcttcatctggtacaagtgtatctaatcaggatttgtttatcacggcaactgccagtaaaacgaatgtatacgagcaggaagcatttgtcttgacctataaaatatacaccagagagcatgacttgcaattaaataatgccaaactgcctgactttaaaggatttcattctcaagaaattgaaatgaatgcaaatgcaagatggacacaggagcattataaaggacgtaactataatacgacaatctatcgccaatttgtattatttccccagcaaccgggtaagttatttatagaaccggcacagttccagatgacggtaggtaaagctgtacaatctgacgatccttttgatgcatttttcaatggtggaagcaatgtagttaaagtaccgaaatctatcgttactcctaaaatagcaattaatgtcaatccgcttcctgctggtaaacctgcaaacttttcaggtggagtgggagagttcaacatttcttcttccatcaatagcaaggagctgaaaactaatgatgctatcactatcaagttagtcatctccggaactggaaacctgaaactgatttctaatccggaaattaaatttccagatgactttgaagtatatgatccaaaggtggacaaccaagtcagattaactcaggaaggtctaacaggaaataaagttattgagtatctggctattccaagacatgctggcaattataaaattccgggggtatctttcagctatttcgatatccgttcaaaatcttacaaaacgttgaaaacggaagactatgtaatcaatgttgagaaaggtgcaggaaatgctgatcaggtgattgccaatttcaccaataaagaagacttgaaagtattgggtgaagatatccgttacattaagcaaaatgaagttactctccaacctaagggtagtttcttctatggctcaatgacctattggctgttctatatcattcctgctctagccttcatcatcttctttatcatctaccgtaaacaagccgctgcaaatgccaatgttgctaagatgaaaacaaagaaagctaataaggtagcaaccaaacgcatgaaactagccggtaagttgctctctgaaaacaagaaagatgccttctatgatgaagtactgaaagcattgtggggatatatcagcgacaaacttagtattccggtttcccgtttgtcgaaagacaatattgaagagaagctgagaaaccatggagtaagtgaagaactaattaaagaattcctaaatgcattgaatgattgtgaatttgcccgtttcgctccaggtgatgaaaatcaggcaatggataaagtttattcttcttcaatagaagtgataagcagaatggaaaattcaataaaacattaacccagaagagattgtgtcatgaaaaaaatattgttttttatattattatcaatgtcagtcacttgtttcggacaaggaactcaaagcattgattctatacaaacaaccgaagctgattctatccatgcgggttcacatacattttctgatacgaagttggaagatgtaacaaaagccgaaggagattccgcatatataaaagatgattatgcaactgctatccaaatatatgaatccttattaaaaaatggggaatctgcagatgtgtactataatttaggaaacagttactacaaagctggagaaatagcaaaagccgtactcaactacgaacgtgctttgcttatgaaaccaggaaacagcgacatccgtgccaatctggaagtagcacgcgctaaaacaatagataaagtagaacctgttccggaagttttctttgtatcatgggccaaagccttgataaacagtatgagtgtagacgcatgggctacatggggaattgtctcctttattctatttatcatcgctctttacttctttattttctccaagcagattatactgaaaaaaggaggatttatatcaggtatcgttttcttaattgttgtaatatgctctaatctttttgcttcagagcaaaaagaacgtttagtaaatagaagcgaagcgatcgtcatgaatcctagtgtaacagttcgcagcactccgagtgaaagtggaacaagtttgttcatccttcatgagggacgtaaggtcagtatcaaagataactcaatgaaagaatggaaagaaattcgcttggaagacggcaaagtaggatgggtgccggcttccgctattgaagtgatataaaattcgtaaacagaatttaggaatttaggaaaaaagataagcaaataatttgttttatctttttttttgcttaagtttatagcgtgataaaaaattaaatacaatatagtattaaccattaaatttatgagacatgagaacaataacatttaatgaacttcgcaagattaaagattcattgcctagcggtagcatgcatagaatagcagacgaacttggtttgcacgtagatacagtgcgcaacttcttcggaggccacaatttcaaggaaggaaaaagtgtcggaatacatcttgagcccggtccggatggcgggcttgtaatgctggatgacacaactgttctcgaccgggctctaaaaattttagatgaaataaacatgagtatgcaaaaagaacaagctaccgaacctatgcaaatttaaaatataaaacaagaatcccaattgcccaaacaattgggatttcttatttgttcaccttcaaaaacagattattatggaagataaattagtaaccttagctattctgacttatacaaaagctcagattctaaagaatgtcctcgaaaatgaaggaatagaaacatacattcataacgtaaatcaaatacaacctgttgtatcttcaggagtacgtctacgaattaaagaaagtgatctaccacgtgcattaaaaataacggaaagttctacctggttatctgaaagtatagtgggagagaagacacctaaggtagataataaatcgaacaaaattttaatacctgtcgacttctccagttattcgatgaaagcgtgtgaatttggctttaatttggctaaaactgagaattctgaagtgattctattacatgtttactttacaccgatatacgcttcgtcattaccatatggcgatgtattcaattatcagatcggagatgaagaatctgttaaaacaatcatccaacaggtccattcagatctcaacgcactatctgataagataaaggaaaaagttgcatctggagaatttccggatatcaaatatagttgcattttgcgagaaggaattccagaagaagaaattttaagatatgccaaggagcagcgtcctaaggttatcattatgggaacgcgtggaaaaagccagaaagacattgacttaattggcagtgtaacagctgaaattattgatcgaagccgcacagcagtattagcaattccggaaaatactccattcaaagaattcaatgaagtaaaacgtattgctttcttaaccaattttgatcagagagacttgattgcttttgaagcatttttcaacacttggaaatctttccatttttcagtctcattaatacatctggctgaatccaaagatacttggaatgaaattaaacttgcaggtatcaaagactatttccaaaaacaatatcccgggcttgaaattcattatgatgtggtaatgaatgataatctattaaaaggacttgatcaatatatcaaagataatcaaattgatataataacattaacttcctataagagaaatatatttgcacgattatttaacccaagtatcgctcgtaagatgattttccattccgatacgccattgcttgttattaacggatgatggagaaagaacgaaaataaactgtttacgttcagggaataattatcattatgtttaatagaaaaatagataatacttataactaatttctctctcttctctctctaaaaccaaaagaggcattccaaatgaattggttatagcctctttttcattttctcacaaaaagaaattcatcattatatattttgataaaaaaaaatcagaatcatcattcaagcttctttatttgtaaaaacaaaaaagactatcctaatttaaattttgggatagtctttttataaaaactgaatataattatttcatcatcttatcgatttcttcaaattcaggacccatgttcagattatagtaaacacggtaaagaccctgtaaccacaaatctttctgatcaggtttcaaagctctggctttttcgtagaatggcttagcttcttcatagaatttcttcactgtagcttgtgcctctgcatatttcggatcattgatatctgttgtagctttatcagcataatcctgagccttcatcaaatacactaatcctacattagaatatgcctctgcatattcaggatctgcagcaatagctttcttgtagaactcaatagctttatcatattctttcatattatgataaagatacgctttcacataaagatacaacttgttattagcatcagtagacaacattctatcagcaaattccattgctttagaagcttggttagagctagtatagtaatctaccaaattcgcaaagaaataatcatttccagggaattttaaaataccttcttccaatgatttaacccatgctgcagtatcacctttagctttatatgcatctgccatcaattgcattgcaaacttaccgccatctttgtcatccaaagcagcaggagcatatttaataattgcatctttatctcctactctgtcagcagccaatgttgcgtaatatgctatttgtgccaaaagagtatctgttttagccaaattttgctctgccaacataggataagaagctgattctacgtatgttgcaaagaattgcaaagcttccttattcttatcaaggttaaagaattgaataccaccgttaattaagttaggacgttcaaccaatatagttgaagcatttgcttttctatatttgtttttaattttacctttttcattaggtacttgagctagatcatcacatttagtataatactcaaacatttttaaaatgctgttgtatgccttcaatgtgtcaaacggctgtttcagaacacccttcttatcacgttcttcttcaataaaacgtttctgaataaatccagcaacgtcccatgtgtcaggaagatccttggtctcagggttcttaatggcttcattaatcagcttttcagcttgattaaaattcggttttacatcactggcaatgcttttggcttcttttacattcttcatttgagcgaatgataagcttacggccatcaataaaaccattgaaaataatactcttttcatgattgttgtttgattaattattaatattatgtctattcctcaatttcgttgttattttcattaacatctgtagcagtatctgcattgtcaacatcctgatcagtagtcagatcactgacaatagtaccttctgcttcttctgtgggaacttcatcctcaagactttctgtcattactttacatacagaaccaatctgatcgttacgtttttcaagattaatcagacgaacaccttgagtagcacgtcccataatacggacatcagcaactttcagacggatagttattccggatttattgataatcattaagtcgttctcatcagtcactgacttaattgttaccaacttacctgttttttcagtaatattcatggtctttacacccttaccaccgcgattagtcttacgataatcttcaatttcagagcgtttaccatatccctgttcagaaacaaccattacggattctgtttccaaatcttttatacatatcattcctattacttcatcctgaccatcattatccaatgtaataccacgtacacctgtagccgtacgtcccattacacgaactgcagcttcatggaaacgaatagcccgaccattacgattagcaataatgatttcattattaccattcgtcattcgaacttcaattacactgtcatcctcacgaattgtaatagcatttacaccattctgacgcgggcgtgaatattgttcaagcaatgtcttcttgataacacctttcttcgtacagaataatacgtaatgactattgatatattcagtgtcatccaggctcttaacacgcaaatatgcagtaacactgtcatcagagtcaatatttaacaggttttgtatagcacgtcctttggaattcttcgttccttctggtatctcataaactttcagccaataacatttacctttttgtgtaaagaacatcatggtattgtgcatagtagccggatatatatgctctacaaagtccgcatcacgagtttctgttcccttagagcctaccccaccacgattctgcgcacggaattctgttaatggcgtacgtttgatatatcccatatgagatattgtgataatcatctgatcatcagcatagaagtcctccggattaaactcttcggaagaataaacgatttcagaacgacgttcgtcaccatatttcgctttaacttccaataattcatctttcatcaccttacgacatacctcatcatcagccaaaatgctttccaaataagcaatctgtttcatgatttcttcgtattcagcatgaagctgatcctgcatcagaccagtcaactgacgcaaacgcatctctacaattgcacgtgactgtatttctgtcaggttaaaacgttctatcaaacctgcaatagcatcatttggagtcttagctgcacgaataatacgaataacttcatcaatattatcagaagcaatgattaaaccttcaaggatatgtgcacgttcctttgctttacgcagatcgaactgagtacggcggataactacttcgtgcctgtgctctacgaagtatttaatcatatctctcagattcaatgtcttaggacgtccgtgaaccaatgcaacattattcacaccgaaggaagtctgtaaggctgtcatcttatacagcttattcagcactacgcttgcattagcatcacgttttacatcgataacgatacgcataccgtcacggtcagactcgtcgtttgcattcgagataccttctattctcttatcgttaacaagatcagcaatatatttgatcagttcagccttattaacattataagggatctcagtcactacgattttatcatgtgtctgtccggtttcaatttccgcttttgcacgcattactacacgtccacgacctgtcagatatccttcacgtactccgctgataccatatatataaccacctgtagggaaatccggagctttgacataagtcatcagttcctctactgtgatttcctgattatcaatatatgcttcacaagcatcaattacttccgaaagattatgaggaggcatattagttgccatacctaccgcaataccggaagcaccattaaccaaaagattaggaatacgggtcggcatcaccttcggctctgtcaacgtattatcaaagttaggttcgaagtctacagtttccttatacaggtcatccatcatcgcttcacctaacttgtttagacgagcctccgtataacgcatggcagcggggctatcaccatctacagaaccaaagttaccttggccatctactaaaggataacgcattgcccattcctgagccatacgcaccatagcataataaactgaagagtctccatgcggatggtacttacccagtacttcacccacaattcttgcagattttttataaggtttgtctgaagtattacccaattccatcattccgtataaaattctacggtgaacgggcttaaatccatctctaacatccggaagggcacgtgaaacaatgaccgacatggagtagtcaatgtacgatgacttcatttcctcctcgatgttaatctttataattctgtcttgttcaagcatttaaaatgattattaattatacattgtatggtctgtgaaaaaccacgctaaagtactacttttccacgatatacgaaagtttttccgaagaaagtttttttctgcttgaaggacagtctgtttgtctatatttagttattaaaattaaaaatctcaaggaacggattgacttctaaccattaatattagaaaaagaaatgagaaaaagaataaatactaccattaaggagactatatctgtgaaaaacagggagtggtatttgttataccttatatatataatacaaagcattgtttttatggcacgccatttgtagatataagaaataaagcaaatatgcaatacaaacttgattaaatgcgtatatttgccagtaaataaccccttagaagaaaaggaaaaagtatgaataatcaattctcacaaagagtttccgacattatcgtctatagcaaggaagaagctaaccggttgaggagtaggcatatcggacctgagcacctacttctgggattgcttcgtgacggtgaaggaaaagctatcgagatattgtcaaaactcaacaccaatttagctgcagtaaagcagcagattgaagctcggctgaagacagaagctgatgatatgctattgcctgatgcagagataccgttgtctaatgacgcggcaaaaatattaaaaatgtgtattttagaagcacgtggaatgagaagtaatatagctgatacagagcatgttttgttagcgatcctaagagaaagaaacaatatggctgcttccgtgctcgaagctaatgacgttaattacgtgaaagtgttggaacaagccacattgcaaccggatgtaaattccggcatgggattcccggaagacgatgatgatgaagaaatgtcttctccccgatctggtggaagcggttctgaagaacgccagcaacaggcgcaaacagcttcaaaaaaaccggctaatgacacgcctgtacttgacaatttcggtacagatatgacaaaagcggcagaagaaggacgtttggaccctgtagtaggcagagaaaaggaaattgaacgcttggctcaaatcctgagtcgccgtaaaaagaacaatccgattctgatcggtgaacctggtgtaggaaaatcagcaatcgttgaaggacttgctttgagaattattcaaaagaaagtctcacgcatcttgtttgataagcgagtagtagctcttgacatgaccgcagttgtggcaggaacaaaatatcgtggtcagtttgaagagcgtattcgttccattctcaacgagttacaaaggaatccgaatgtaatcctgttcattgatgagatccatacaattgtaggtgcaggttctgcagccggttcaatggatgcagccaatatgctgaaacctgcattggcacgcggcgaaatacaatgtattggtgctactacccttgatgaataccgtaagaatatagaaaaagacggcgctttggaacgtcgtttccaaaaagttatggtggaacccactactgctgccgaaactcttcagattctgcgtaacatcaaggataaatatgaagatcatcataacgtgaactatacagatgaagcattggaagcttgtgtcaagttgacagaccgttatattacggaccgtaacttccccgataaagctattgacgctttggatgaagcaggatcacgtgtacatctgaccaacgtcaatgtacccaaggaaatcgaagagcaggaaaaactcatcgaagaagctaaaagcaagaaaaatgaagctgtgaaatcgcagaattttgaactcgctgccagtttccgagataaggaaaaagagctcacgcttcagttggacgaaatgaaacgagaatgggaaaacagtctgaaagagaatagacagactgttgatgcagaggaaattgccaatgttatttctatgatgtccggcattccggtacagcgtatggcacaagccgaaggaatcaagctggctggcatgaaggaggatctgcaatcgaaagtaatcgcacaggatccggcgatagagaaactggtcaaggctattttaagaagccgtgtgggattgaaggatcccaataagcccattggaacctttatgttcttaggtccgactggtgtaggtaaaacccatttagccaaagaattggcaaaatatatgttcggggcttccgatgcactgattcgtatagacatgagcgaatttatggaaaaattcacagtctcacgtctggtcggagctcctccgggatatgtaggatatgaagaaggcggacaattaactgaaaaagtacgtcgcaaaccttattctatcgtcttgcttgatgagatcgaaaaagcacatccggatgtgttcaatctccttcttcaagtgatggacgaaggccgtctgactgacagttatggcagaatggttgattttaaaaatacagttgttatcatgacttccaatattggtacccgccagttaaaggagtttggacgtggtgtaggctttgctacacaaagccgtctggatgataaagagttctcgcgaagtgttatacaaaaagcattaaataaatcattcgcgcccgaatttatcaaccgtgtcgatgaaatcataacatttgaccaactctctttggaagctatcacgaaaatcattgatattgagctaaaaggactatatgatcgtattgaatctattggatataagctagttattgatgatgaagctaaaagattcgtggccgaaaaaggatacgatgtgcaattcggagcccgccctttaaaacgagctattcaaacccatttggaggatggactgtcagaactcattataacttcttctctgaaagaaaaagatgtcattcaagtctctctgaataaagagaaaggtgaattggagatgaaagttattgcatcttgaaagaagattacttaaataagataagtcataaaatatgccagaatgtcagaccttagggtctggcattttttttgtctctatctgaacaaatatcaattaaaaacattctaataaataaaccaaaaaaatatacgttattatgcaaaaaggtaatattggggttacaacagagaacattttccctatcatcaaaaagttcttgtacagtgaccatgaaatttttcttcgcgaattagtgtctaatgcagtagatgccactcagaaactaaatacccttgcttccattggggagtttaaaggtgaactgggcgatctgacaattcacgttgaattaggtaaagacactattactatctccgaccgtggtattggcctgactgcagaagaaatagaaaagtacatcaatcagattgcattttcaggagcgaatgattttctggaaaaatacaaagatgatgcaaatgcaatcatcggacatttcggtttaggcttctattctgcctttatggttgcaaaaaaggttgaaattatcaccaaatcctacagagacgaagcacaagctataaaatggacttgcgatggtagccctgaattcactattgaagaagtagataaggcagatcgtggttcagatatcatcttatatatcgatgacgattgcaaagaattcctcgaagaagcacgtgtttctgagcttctgaagaaatattgcagcttccttcctgtccccattgcattcgggaagaagaaagaatggaaagatggaaaacaggtagaaaccactgaagacaatattattaacgacactactcctttgtggactcgtaagccgagcgaactgtcggacgaggattataagtcgttctataccaagttgtacccgatgtcagacgagccattattttggattcatctgaatgtggattatccgttccatctgactggtatcctctacttcccgaaagtaaagagcaatattgagctgaataaaaataagattcagttatattgcaaccaagtatatgtaacggattccgtagaaggaattgtaccggacttcctgactttattacatggagttattgattccccggatattccattgaatgtatcccgttcttatttgcaaagcgactcgaatgtgaagaagatttctacctatatcacgaagaaagtttccgaccgcctgcaatcgattttcaagaacgaccgcaaacagtttgaagagaagtggaatgatttgaaaatatttatcaattacggcatgcttactcaagaggatttctatgagaaagcgcaaaaattcgcccttttcaccgatacagataacaaacattatacatttgaagagtatcagacccttattaaagataatcagacagacaaagatggaaatctgatctatttgtatgctaataataaagatgaacaattcagttatatcgaggctgccaccaacaagggatacaatgttctgcttatggatggtcaattagatgtagctatggtaagtatgctggaacagaagtttgagaaatctcgcttcacccgtgtagacagcgatgtgatcgacaaccttatcatcaaagaagacaagaaaaacgagacactggaaggagaaaagcaagaagctatcacaactgctttcaagagccagttacccaaaatggataaagttgagttcaatgtaatgacacaggcattgggagacaattcagctccggtgatgattactcaaagcgagtatatgcgtcgtatgaaggaaatggcaaatattcaggccggaatgagcttctatggggagatgccggatatgttcaatctggttctgaactccgaccataagcttatcaagcaagtgcttgacgaagaagaagcagcttgtcaccctgaagtagctcctatacaaacagagatgaatagtgtcagcaagcgtcgcaacgaactaaaagacagccaaaaggacaagaaggaagaagatattcctactgcggagaaagatgaactgaatgagctggataaaaaatgggatgaactgaaaaataaaaaagaaggcatctttgcaggatatgccagcaacaacaaggtaatccgtcaactcatcgacctggctttattgcagaacaatatgctaaaaggtgaagctctgaacaacttcgtgaagcgcagtattgagctgatttaataccgcccctttatttataacataaatcaatgaaagagcattcaacactaaaacgtgttgcaatgctcttttttcatcataaaacgaacgctaaaatatcgataaattggaaagtattgcatatatttgaacactaaatgataaatacttcaattgtttgatttgggttatgagaaaaatacttttagtgttaattgctatatggttattcatgccgactgtctgcgcccaaaaagtaggtcttgtcttaagtggtggcggtgccaaaggattgacacacatcggcatcattcgcgccttagaagaaaataacattcctatcgattatattacaggaacttccatgggggccattatcggctctctttatgcgatggggtattctcctgatgatatggaagaattattgaagtcagaggactttaaaagatggtattcaggacaaatagaagagaaatacgtataccacttcaagaaaaatgtcccgacaccagagttttttaatatccgtttctcattcaaagactcattaaaaaacttcaaaccacaatttctgcccacaagcgtagtaaatcccatacagatgaatctggtttttgtagatttgtatgcacgcgctacagcttcgtgtaaaggcgatttcgacaagttattcgttcctttccgatgcatagcttctgatgtctacaataaaaagcaactcgtaatgagaaacggagatttgggagatgccgtccgagcttccatgagctttccctttatgtttaagcctatagagattgacaatgtgctggcatatgacggaggaatctacaataatttcccaacagacgttatgagagacgattttcatccggatattataattggaagtgtggtatctacaaaccccaccaaacccaaggaaaatgacctcatgagccagatagaaaacatggtcatgcaaaaaaccgattattctattccggattcaatgggtattctgatgacattcaaatatgacaatgtcagcttgatggatttccagcgaatagatgaattgcatgatatcggatataaccgaaccataagcatgatggattctataaaaagccgtatacaaaggagggttaatttggataatatacgtttgagaagaatggtataccgaagcaactatccggaattacgctttaaaaacatcattattgatggagccaatccccaacaacaggcatatattaaaaaagaatttcatagctctgacaataaggaattcacttacgaaaacttgaaagaaggctatttccggctgctttcagacaacatgatttccgagatcatcccgcatgccgtatacaatccggaggatgaaacatatgacctgcatttaaaagtcaaactggagaataattttgccgtacgattaggtgggaatatttccacatccaactcgaaccaaatttatctcggtctcagctatcaggatttaaattactatgcgaaagaatttctttttgacggtcaactcgggaaagtctataataatgcgcaattcatggctaagatcgacttttctactgcgatcccgacctcttaccgctttatcgcatctattactactttcgactattttaagaaagacaagttattttccaggaatgacaagccagcatttaatcagaaagacgaacgcttccttaaacttcaggtcggactaccttttcttttaagcaaacgagctgagtttggaatagggatcgccagaatagaagacaaatatttccagagaaatatcatcgattttgagaaagacagattcgacagaagccgttatgatttattcggcggctctatcagcttcaatggaagtacgcttaattcacggcaatacccgacacaaggctacaaagaagctcttgttgcacagatattcatgggacgggaaagattctatcccggtgaagagaccaaaggagttcaaataaataaagaacaccattcctggctgcaattatcatatatgaaagaaaaataccatacaatgagcgaacactgggttttgggatggtatttaaaagctttgtacgcttccaagaacttttccgagaattatacggcgactatgatgcaagcaggtgagttttcacctactctacatagcaaactcacctataatgaagctttccgcgccaatcaatttgtgggagccggcattcgtcccatctatcgcctcaatcaaatgttccatctgcgaggtgaattttatggttttatgcctatatatccgattgaaagaaactcattaaataaggcatattatggaaaagccttctctaaattcgaatatttaggagaaatttctgttgtgtgtcaattaccgttcggagacatctctgcttatgtaaatcattatagctcaccgagaagggagtggaatgtcgggttaagtatcggtttccaactgtttaattaccgtttcatcgaataattttctacaaaaaaaagtcgccgaatgcttgctaattcgggaaaagtacgtatctttgcacccgttaaaacgaaacaatggtcgcgtagctcaactgaatagagtagctgactacggatcagccggttacaggtttgaatcctgtcgcgatcaccaaaatcctctgcattttttgtggaggattttgttttttaccccattccatcgaagaaatccggcatcacgagaaagaaaattaaacggtcgttttaccacaaatgactgcaacttttgcataaatcaagcggttgtgttatctaaatcgagcggtcatttcggcccagtccgatattttaaatcaaacgaccgtataattatgtacaatcaataggatgttttataaaaacactttaatagttattttcaaacatcaagaagtttattttcaaacattgggaagtttaaagagtgcatggcaacatatgttgaaacatgcactttcatcttcaccttttgctcgaaagcactataaacaagtggatacaggatgaaggaaaagcgtttcacttttatactacattaggttatcaaatatgctattaggttatcggattttgctattagctaatcaaattatgctaatagcaaaaaaatagaaagaactaaaaaatcccccttcaccttgtatctgcctgttcatgggagacatgacaaaaaggtgaaggaggaatacctatttataaaatgtatggagaatcgatacttctcagtatatcagatcagcatttaatattcagttcgttcaagactttacgtattgcctcaaatgtcgtaattcgagtcggaaccaacggcaatcgaagtttattttcaatcatccccattgcattcagcatagattttactcctgccggatttccatccacaaacaaaagatcaaatagctcagtaaatcgatgatgaatagtgagtgcattagcaaaatcaccttgaagcgccaaacgtgtcatacgactgaattcacgcgggaaagcattgccgattacagagatcactccaacagctcccaaggttattaatggaaaagtaataccatcatcaccggaaataacattgaaattatccggtttattcttgataatgtcatccatttgagtaatattaccggaagcttctttaatagcgattacattactaaaattacgggcaatgcgcaaggttgtctcagcagtcatatttactcctgtacgccccggcacattatatagcacgataggaagttccgtagcttccgatatggctttataatgctgataaattccctcttgcgatggcttattataatatggcactacagacaatatagcgtcaactcctgtaaaatcgtcatttttcaatgtttctactattgcgcgtgtattgttaccgcctacacccagcaaaataggaattcttccgttaacgcggtcaatcaccatctttttgatggttttcttctcttcctcggtaagagtcggtgtttcggctgtagtccccagcacacacaagaaatccgcattattctgcaatagatagtctaccaaacgcatcaacgcatcataatcaacgctttcatcctctttgaaaggagtaatcagtgctacccccattcctttcaatttagtctgtatcatgagttttaattataatctctaattttattaggcgcaaaagtacgaatatttttcatatcttacgatataagtttcagaaattcgtcctcgcttagtatggttactccaagtttttttgctttttccagtttggctggccccatattgtcaccggcaaggataaaactggtcttagcagagatacttcccacattcttaccgccatttttctcaataaggtctttatattcgtcccgtgaatgatgcgtaaatacgccgctgatcacaatagactgaccggctaatttatccgtatatccactcatatcttcttctgtacgatagagctgtaacccagcctcttttaacctgccaactaactctcggttagactcatttgagaaatacagaagaatgcttcgcgctattttttccccgatttcatcgatacttatcagcttttcaaggtcagcctgttgcagctcgtcaatgtctccgaacgacttggctattttctttgctaccgtctcgccaacaaaccgaattcccaaagcaaagatgacgcgttcaaaaggaactgtcttactctgctcaatccccgtaataatattctcagcagatttttctcccatacgatccaaccctttgatatcatcggctttcaattcatacaaatccgccgtattatgaatcaatcctaaacgatagaacatatccaccgtttcaggacccaacccatcaatattcatggctttccgactaataaaatgctctattctacctttaatctgagggggacatgcagtttcattaggacaataatgggcagcttcgccttcatatctaattaatttgctgccacattcggggcaattggtaataaacctgaccttctcaccaagcataaagctacgggcatctttatccactcctgtaattttaggaatgatctcgccacctttttctacataaaccatatctccgatatgcaaatcaagcccttcaataatatccgcattatgcaatgaagcacgtttgacaatcgttccggatagctgaacagcatctaagttggcaacaggagttacagcgcctgttctgcctacctgataagttaccatattcaatcgtgtcaatgcacgttctgcctgaaatttataggcaattgcccatctgggtgatttcgccgtaaaaccaagattcttttgttgtctcagactatttaccttcaagacgattccatcagtagctacaggcagattctttcgttctacatcccaatgattgataaattcaaaaacctcttccaacgtctggcatttacgcgtcaaatcagagattttaaatccccattttgcggcttcctgaagattttcataatgtccgtcacaaggcagattatctcccaaaagataatataaatacgcatccagcttgcgagaagctacaatagaagaattctgaagcttcaatgttcctgaggc

SEQ ID NO: 4666 - DNA, 1347 bp, Unknown
  gut microbiota DNA sequence
catttccctaaatccattataaaccacatggcttcaatcgcatggccaggggtaatctgccgtccttcaaagcaatctatcagattaccattcacatctacattctcaacaatgattccgccaagttcagggcgatagaaaacatccattacttcatgaatacaagtatccatcgcttgttccaaatagtctttccctaaaatatgctctatttccatagcaagattgcatagtatcatcggcagggcaaagtttttcagattacgggtacctggatgaagcttattccatttaccttttgggttatttactttggaaaggataatatcgaaggttttcttagcaatgtcagcatattcctgattaccagttgcaaggcttaattgcccgaaagccatggcagcgaatgtatatgaaaagatattgtatggttctaccaatggtctacccaaacggtcgagggaaaaataccaattatagtctccatcatgtccatatttttttagaaattcaccgccttgaacggcacaatccagccattctttgcgtttttccactttattgtaaagcatagagaacatccacacttcgcggccttgcagccagataaacttatctgtatcgaaaactcttccttcacgatccaaacaggtgaagtagcctccatattcatggtcttgtgagttttcaagccagaaaggaagaacattatccaagagttcatccttgtattgatttgccaatttcttaaaatccatacatcttttattattaagttattaaggtctttttgttttactattccgaacgggtccaatatctttcaatctcctccagtgacttcccggtagtctccggcacgagtttccagacaatcagcatatacggcacgcacatgatggcgaacaggaagaatgttccggcgggggtaaggttctggagcatccagggggtcaactgtccgatcaggtacgttccgatccagagagcgaatcctgctatcgacatggccagtccgcgaaccttggtgggatacatctccgagaggagcacgaataccacagcgcagatagacacggcacaacagaatacatagaacaggaagaaaataagcaggaagaggctggatactcccagggaatctccgaagaggaagtacaggccgatgagaatcagagaaacaaccattcccgaaactccgtaataaaccagcttcttgcggcctaccttatcaatgatgacaagagccagaacggtggtcaaggtgttgactagtcctaccagaacttggtaaaatgaaagttaactgtttgcatagctgtattatggtagaaaagttttatcttt

SEQ ID NO: 4667 - DNA, 1478 bp, Unknown
  gut microbiota DNA sequence
cgaacagtccgccgataatagctcctgccgcagcacccgagccaccgccgataatgccgcctttcgtcgtattgttcattgtaccgcaactacccagtagtatggcgccgctcagcagaaatgctgtcattttcatctttttcataccttttattttttaattggttcaagttttactaatgcaaatttatgtatataatacatttgttggcattaaaaagtttaccattgcagtttttttagagaattttccttttaataaagagaaaacggccggacttatacgttacttgtaattcaggaagttttcctgcaccagctttcctgcctgccatacggcgcgtatgttcagttccttgtccatgatgaggatgtcggcgtccttgtccttttgcagggaacctttgcggtcgtacacgcccatgatgcgtgccggggtttcggaagccatgcgcagggcgtcgcccaacgggatacccgccttgaccatagtacgcaccagcacgtccatggtggcgatactgcctgccaatgaggagcggtcggcaagcttgcacacaccgtcttcgatgatgtagcgcgggttgttgatttccttgccttcggtggcggcgcaggagagggcgtccgttacgaggcaggtgtgctctacacctttcagtttgtatgccagtttcaggatggtggacggcaggtggatgccgtcggcaatgagttcgatggtcatgccgtcggtcaggtagacactttccacagtgccttcgtacttgtactcgcggcgtttgtggaagccgggcatggcgttgtagaagtgggcggcatgggtaaatccggcttcgtaggcggcacggataccgtcgtattcggcttcggtgtgcgatacggctgccagtatgcctttttcgcgcaggtagcttgcaaattccagtgctccgggcagttcgggagaggcgtcccagcggcggatgcaacgggtgctttccaccaactcgcggtattcctgtccgtcaatctccttcacctggtcggcaaactgttcgcctgccattttcttgttgagatagggaccttcgatgtgcaatcccagtacggggctgtcgggctctgccataagctgctcgcacacttgggctgcctggtgcagcttttcgaacggagacgaggaaatggtagggtagaaactcgtagcgccatgaccgaggtgtgcattgatgatgctgcgaaacgcttcttcggtacattcggtgaagtcgtggccgccaccgccatgcgcgtgcatacacacgaagccgggcacgatatacatgcctttggcatcgatgaggcgtgcgccgatgagggcgaggtcacagttggtcacttcgagtatttttccgtcgcgcatcaggacggaaccttcattcagccagccttgcggggtgaatatgcgtccgttgataatttgagtaagcatttttagatttatgatttaagattta

SEQ ID NO: 4668 - DNA, 1857 bp, Unknown
  gut microbiota DNA sequence
cgcccggtgccaaacaaagttacgccatctggaaaaccgaaggaagagtagatgcccaactgaccaaatcgttcctgaaagaccaggcgctgaaagtatcgctaaccgcgaaagacctctttcacaccgcccacagatacttcaccatctatggcgaccgtaccttcagttccagtcgtgaatataccgatcagcagcgcttcggtatccggctgagctatcagttcaacgccacaaagagcaaatataaaggaaccggagccggagcaagcgaaaagtcacgtttgtaattcccggtttcacaaagatgaccaacaagtcggttccatcacaagagaggctgactaaaaagtcaatagtattcccaatctcctccttcgggaaggaggagtacccgtagggggaggtggtaggtgaacacattaaagttactaccgactttttaatcagccccctacttaggttactactgattttttagtcgaactcggggaaaagtagtatttttgcagcttcagaatccagataaagaatgttcctgttccataaaaaccagacaaaacgagaggccttcgggcaaatgtttacggaaatgtacccgcgaatggtccgttatgcctcccagttgatgggcgacggagaggaagcacgggacatcgtaagcgaagtgatggaacaggcctggaaacacttcgaccaattggacgaggccgaccgcggaggctggatttatacagcagtccgcaacacctgcctcaaccggatgaagcacctgcaagtggaacgtgacaatgcgaaagccctttacgaagcaacgctggccgatgtaaaaagtaactatcgggaacacgaagcactgttgcagaaagcggaaacgatagcccgaagcctgccggaaccgacttgcaccatcctgcggctatgctattacgaacatctcacctatcgggaagtcgcccaacaactcggcatcagtcccgacacggtaaaaaaacatatatccaaagcattgcgtacactacgcgaagccatgaaagaataaagaaggaggacacgctatggaagaaaaagaaaaacgtaccagcaaagaagaagattccggctacggactgacagcagacaacgacagttgcaggctggcagacagcgatagttctgaaccgacagacagcaacagttgcgaaccggcagacagcaacagttgcgaaccgacagacagcaacagttgcgaaccgacagacagcaacagttgtggactggcaacggacaaccaaaccccgttctccgaaaacgcggaaatacgccgtctgcaaaatgcctttggtgaagcgttgggtgatctgcctctgccggacgaagtccgggaagaatggaccacattcctgcaacggcaggcacagcagaaacgcaaactttatctccgcatctgtctatccggtggtgtggcagcagccatcgccctgttattgttactttggtccccttggcacatcacggacaaggacagcatcctgcagaacatcgaaatcttcaccgccctccatgcaccggaacaaattaccactatcgaagagaacggcagaatcatcgtatctaccccgcccgccacaaccacccgcctcacattggaggacggaagtcacgtccttttaagtgcaaacagccgtctggaataccccaaagagttttcctctcagggaagccgcaccgtaaacctcaccggagaagcacgcttcgaagtaaccaaagacgcccaccgccccttcatcgtctctgccgacaaaatgcagacacaagtgctgggcaccgtattcgacgtaaatgcctatcccggcaatgcccccgccgtcaccctgt

SEQ ID NO: 4669 - DNA, 5764 bp, Unknown
  gut microbiota DNA sequence
actgacagaaaaaaaaggatggaccaaagatgagttttattatgacaacaccgaaataataaccgtactgcaaaatatagggacctggtataatatcagcgtcatctgccattctgcagaccttttacacaaacgagtccatttccgtttcagccggaatgttccgataaagactctactgaatgtactgaatgatttaggcatcgcacacttccagtataaagataaacaaatagtagtagaataaacacaatcacttcctggcgaaaaaacgagctttcatctgtcatctttcaccattggtcgtcaaactccttattcatcggagcttccgatgaggctgactaaaagtcggtagtatctctattctcctccttcctgaaggaggagaatagagatagcatacgcaatatggcaccataaaaaacagaaatccctcttctccggatttcgttcttcctgctcaatccgttcttcttttcccatgtacaaaagcccttcatcaacttcgaacgtatttcttctgtctcgcatagctcacacctattctgcacataggtacgtgtcaataccaaacgaatgatttcccgattcggacagaaacattcatctttagccaaagcagccagcaccacatccagcaggcaaagggtacatcgtaattctgtttccgataatcggtcgatactctcaatctgtccaaagctgggccagttgtctttcaaaaaggcaagtttattggtggagctttgtaaatcaagcttcatcaggcagggacggggacaagtagaatcattcatcactactattttttatttgtttgtgtatttgcgtatctccaaaaagaaggcgcagaaactattactatactatctcatgagaggctctggcaagcccgcactagaataataagcaatagctccacgcccattgagatatataacaaatatatatacaatgtggacgtggagactgaccgcctattacctgctagtgctaaatgtgccagatttctcatcacagataataaaaacgttatctccaaatcaataaaacatatcttttttagaagatacgccacaaatataggcatattttcctaataagaataccattaaggaagtaaaatgagtaaatagaagggagatgaacaaaatcgtctacagccaacagactatgttccttcatcgcacgagatacaagaatgatttccccttcttattgcctctgcacaaagaacaagctgcacgaatacccaaaagaagcagggatactttgtttatctccctattatagtttatctttgctactgatatagctagttgttcacgaccgtgatcagctcttaccacggccgtaatcaacgctcttcacggccgtgagcaacatttaccacggccgtgaacaactaatgatgcaagcaccttcatccaacaatgcaggcatcataaaccaaagataaaggcaggataacttatgtatgaacgcttgacagcaagcaggcaatcactatataacccgagttctgtccaagtccggaaactaatgattagttttgcggatcaaaggtagctatatctttataacaaacaagaaacgacgaatatgttataacgatgtaaagcaatggacgaaatagagaaaaacaacggtgagatcatcatataccggacagaagacggaaggacacaacttgaagtccgtttggaggatgagaacgtttggctgtcacaacaacaaatagccaatctgtttggtgtacaaagaccggctatcacaaagcatttgagaaatatctttgaaagtggagaattagaagaaaattcagttagttccattttggaacatactgcgagcgatggaaaaaattataagacacagttttataatttagatgccatcatatcagtcggatatagagtcaactccctacaagccacccacttccgccgctgggccaccgaacgtctgaaagaatatctgatcaaaggtttcgccatggacgacaaacgtctgaaagaaatgggcggcggcggttactggtacgaactactcaaccgtatacgcgacatccgttcatctgaaaaagtactctaccgtcaggttcttgacttgtatgccaccagtgtagactatgacccaaaggcagacgaatccatccggtttttcaaaatcgtgcagaataagttacactatgccgcccacggccacacagcagcagaagtgatcttcgaacgagccgatgcagaaaagccatttatgggactgaccacatttcccggcgaacaaccccggaaagaagatgtactgatagctaaaaactatctcaatgaaaaggaactgaagatactgaacaacctggtttccggatacttcgacttcgcagaaatacaagccatcaaacgttcgcccatgtatatgtcggactatatacatcacctggacctcatcttatcgaccaccggagagcaagttttgcagaacgcaggcacgatctctcacgaacaagccaaacaaaaagcgctgggcgaataccaaaaatatcatgtcaaaaccctgtcgcctgtagaagaagcatattttgacagtatcaagaaactgacagccgaaacaaagaagaagaaaaagaaataaaatacaataaacagtatcatggcaatacaatttgaactctacaagtctcccaaccccaaggacgaagaagacaaggaactctaccacgcacgggtagtcaactttcagcatatcgacaccgactatctcgccaaagaaatacaacaagcgacttcgctgaccgaaggggatgtaaaagccgtcctcgaatcgctgagccactttatgggatcacgcctccgggaaggggaacgtgttcacctcgacggcatcggctactttcaagtaaagctgaacagtctggaaccgatcacctcgcccaagctgaaagcaaaccaaatgaaactcaaagcaaacatcggcttcaaggcggataaaaaactgagaagttcggtaagcgtcgtcaaggtggaacgcagtaaactgaagttacactcagtgccacgctccaacgaagagatagacagactgctgaccgcgtatttcagtaataaccaaatactgacccgctcggactttcaaggactttgcaaacttacgcttaccactgccgcccgacatatcaaacgactgaaagaagaaaagaagttgcagaatatcaatactcgtcagagtccggtttatattccgatgccggggtattatggtaagccggaagtagaagataacgtaaaataagggaaagacagaaagaatatggcttcaataagggtgagagatgctgcaccagaacaagaaaagcaatgagtattgatagaacttttgaacgattggtctttttcatttccaaacaagtcactgcttccaaacttttcctgcaataaatgaatagcgcccatcgcttcttcgtaggtggcacgaaactcccggctgggagtagtggagactacttccagttgctggaaatcgtatttatcaagtgtgtccagaccataagtgtagtcggtgatgacacgcaacagtccgttagcctcattcaatgttagttgcttgtgctcgatgacgttggaaagaagacgaacggtgttcttcaagtcttccaattgctctatctttacttgctggttgatggcataacctttaatcaggtattctttcaaaactttgtttgcccaaacacggaattgagtgccgcgttgcgactttacacgatagccgacggagataatcacatccaaattataaacagccgtctcatattgttggtcactataactacccatatgtgcaaattttgcacatgtgatatcacgttcaagttcaccttccctatagacattattaatatgcctgcctataacagtacgatccttctgaaacaattctgccatttgagcctgagtcagccacactgtttcatcctccaacttcacatcaattgaagtcttcccatcttttgtctgataaatgacaatatttcctctatcgttcataaaatgcctccttttttatgcattgcgcccgtccattgccttggttagcaatggacgggcgtacaaatgtaatactttaaaaaagaaaaaggcgacatatcggccttttattcgaccggacaaacccataattgactcttatattaaagcgattgattcaataaagttataatcgaacgtgccggaatccgaactgttcttccactcttcactttctcaacgggtagcagatcttctccttctacatccgaagtgcgatacacctgccatcgagttttcttgccatttatcttattgattgaaaactctttgtcttcctgcgcatagttaatgagaacaacagcgtatgagccgtccgcattttgataagcagaacacatcagtcctttttggtccgtatcgcctccggggattaaattccccgcttgatcgaaagcagaaaccgacaggcggacagctcccggacggatgaaacgactataattacccaaagcccacatgagtttggagtcttctacccgaccatctttcaagtcatcattcgtgtattcccgaatcagcccgtctttataatcaccgccgacggcacgccaccactgccagctcttcgctcccgcatacacgatgtcatgatggatgatacgggcaacgtaaagtgccgtcttcatcgtacggtcgaagccgtgaccgccgcctatctcttcgtcattccccatgatacaggtttctgactgccagaagccgacgttgtatttatccaaagcttcacgcagttggcagcgcatggcacgcaattcactcagaggagtcgttgtccagtagctatgaccaagcatcagtcggggcacattgggcgtatcacccaaatacgtatccacactatccgggcagaagaaagcctgaatctgatagccacgctgccagtccgtctgatgggtacggagcatacagcgatagtccgaagactcgttcaccataatctgtgtatccattttccggttcacaaactcccggctcagcaaacggacggtccgggctacttcccgattggttgccggagagccttcctgcttcggtcctacccagttccaatgcccgtccggttcgttgaaaggacagatatagttgaactttattccgtcgtgcttctctattccttctactacatcggccaggaaacgggcatatttctcgtaacattccggcttcagattggcggttcctccacgaccggtattggtagccaggccgttctgagtataatatacgggaggggaattcagaaatgcgaggaatttagtgacgccccgttcttttgccagtttcagaaagttgcgttgcccctgttgcttgttccagtcgtaggttccgtcggcttgcagaaaacattcggtacgcatccacgaagaaccgatctgactggcttccccctgctcggtactacctgcaccgacgttgaaacgccaaagagacaagccgattcccttcggttttccattcgcatcgttctctgtgctgaaaagccagtcggctatttggttttgtttctcctgcggccacaagccaaggatgtgcatactccaggcatcggaagcgccgaagtgttccattgtctgcagaggtttgtccacttcaatctgataacgcaggtcgggggcgggttgggaacacccgcctgccatacctatatatagaaaacctaaaacggctaaaaacac

SEQ ID NO: 4670 - DNA, 6400 bp, Unknown
  gut microbiota DNA sequence
taagatgaataaaggcatacagacaatctgttagggcatgagagcaaaagtcgcgttgaattactgtggagaaagcataaagcaaaatgtctgttcatttcaaatagaacctttgtttatctcaaatataagttccgctttaagataaacaaagagtcaatgtgcacaaatatataataacaagatatcgaaaaaaaagtctcaaatacccaacacttttattatcctttcaactagtaatagcaagcttaaatactatacatattcatacacaatcacagatatattaccatcaaataaaaataaaaaaaacaggcttattgtcaaagttttaagcttaaaaacagaaactatcactaaaacaataaacatcaacaacaaatcacaactccccaagttcaagttcatcataagggcgatagaatttccagtaaaccttcactacttttcagatcattttatcacacacactgacttcctcttaccaaagacatacacaatagccgatcaatagaaagatgataagacacgagaagcaatttcgggattacttcttttctttattttataatcgtttccacgcacccgtttttgaaaaaaagatagaaagagctggaatacatccattgcacttcaccatttgattctgagattgtttgtggtttgccaaaagccagcaggcattcatcttctgtcatcccctttaccggtttgccgatatttatttcattccaatgggtgataggagaaagctggtttgtgctgacaaaatcaaacagtttgttcagcatctgcgattctatttgcacaaagtcatccatggtttcctggtgagaaggcttcttctcaggttgtagtttttccatcggagtgactttcttcattataaccaccgatgattctatctgaatattggaaagataatagaccagcttcccatcttttacctgaaattgggccgtacaatagtacgtattcttttgtttggcatccgcctgggaagtaagcaccaggttacaactaaaactcttggcaggaatgcttacttctgttattccgtcacgctgtgcagagcaaacgtttttaatagtccacaacagagcattagcataaatactttcatcgttcatcggactgaaaggaatgaatccgttgactacatatttgctgccgtccgcactgagcggataagtattcttttgttcagtaaaagtttgtgcaatcaaagagggcagtactccacccaataaaaatacaattacccaaagtctcagtcttgttatcatacgccgctatgtttaagaaaacagcattcacgtcttttccatcaaaagaaaagagcgcaaatgctgaaatttatatgattaaactatgtgtctcaattagaaagcaatacccaaacggatcataaagttactagtcttgattccatcgagatcggaaaatacgtcaatgaatccacgctgataagtgaaatccagattgaaacggtcataccacagtcctacgccaatattcataccggcatcgaaatgattgtaatccacttccagataatctgcaaaatctccccagctgatgctttcaccactttctttcattttgctggtatagtcataactggcaaaaacacccagatgcggatcgatgctaagattgtccgctactccaattttccatccgaaagtgaacggtgaatattgaatattgtgtgcgatacatttcatttcatcggctttaaacccacgggaaccgaggccgaattccattccccaatatgctccggcaccgcccataggcttttgatagccgaatgtagcattgtagccaatgtttgaatccgcttcaactccgtcaccgttgaggttcatgatgttcaggcctgcacgcaggaaccattgtgtgttactcgcttgcttttgagtcttgacgattgcacttctggatgatacaatctgtgcctgtgttcctacgcacaacaaaagcgcagcaacaattgataatacttttttcattattgtctatgttttttggttattaattcttgttctttatgacaggtgctattttggttctatcatcggcacccgaaagtttctggatacgtatccattcgtaatcttctgtcgtggcagtatgccagttggtgaacacgcccggataacctacgaccgtaaccgtatatcctcccgacttttcatcatcctctatcttaaaagtggctcccatgattacatcacaatcgttcttgatagtggacaaataagttccccatgcacggatgttatcaagctcacccttcatggcaacttccacctcttctctgctcagtgtccatacatcctttattcgtcctttctcttcaagaattttcacctctacaactgtaggctttacacaaacttcggttactgcatctccggcacgtgcctgcgcatcacgaaacttaaagacagtcttttgcgcatacgtcccaatgacacaaccgaaaaccagcatcataattagaatcagctttttcatattcttttgtgattttatgttaatatgccgcaaaggtatgcgaaaggagtataccagcaggagaaatcatagttccggataggatacagaaatgtatcttatttggatacacatgaagaagtaccgatacggatgttatcggataaatcgcggaagaaatcatgatcgagtatgcacgaaatgcgccaaagaagatggatgtcgatattttccttcttgaatatcttgtatatattgggacgtgtacagcataactgtccggcgaaccaggtaactgtgcgtccctgttcgtgaagcgtacgttcgataagctgtcccgcatgaatcatgcccaatcttcctatgagtgtctccctgactcccaccgggtaaacggataaatgtaagatgaaaggaatatataaaaaagcgtgggaatcttaccttcgtccgttccatgttcaaggccttcgcaatgcccaccaccgagaacgaacaacgcagaaagcccacgccgatatgtacaacacccgtaacctccctttgttttctcaaaaagaggcacggatgtatataaatacacatcaggaggacgtcttagttgctattcgtcattccggtggtcaaagtttgcgaagttctgaaacacgaaagacaaacgcttgtaaacgtcttctctatatacacggctcccccaccacccggaggctttctgcggaagagtccgttgcaaatgtataaaaaaataagtttggtgcgccaattatgattaataatcttttaatcactctcagcaaatgacagtccaattatcccaatagagccatcagactttacacaaaattcgttctatcccgtttaattcttcagcagtaaattccaactggtttaaagcctgcaaattgtctgccagctgattcactgagctcgctcctactataaccgatgtcatccgttcgtctctcagcacccatgccaaagccatttctgccagcgtctgtccacggtgacgggcgatttcattcaattgtcgggcagcctctaccttttcaggcgtcacttgcgaacgttgcagaaaagtggaaggacgtgccgcgcgtgagccttcggggatgccattcagatatttatccgtcagtaatccttgcgccaaaggggaaaaggcgataaagccggaaccgtattcggcagccaaaggaaggctttcagcctcaactgcacggtcgaacatactataacgatactggctgataagacaaggaacgcctgcttttgccatcatttcataagcaatccgcgcttgcagaggaggatattttgagattccgatatacagagcttttccttgctttacaatatcaatcaacgtttgaatggtttcttctaccggagtgactccgtcatagcgatgactatagaagatatcaaaatactccagccctgtccggcgcagactctgatcgatgcttgccatcaggtttttgcgggaactgttaccgccataaggtcctgcccacatatcatgtccggctttggaggagattatcatctcatcccggtatccctggaagttttctttgagaatccgtccgaaattagtttcggcacttcccggcacagggccatagttattagcaagatcgaaatgggtgatgccatggtcgaaggcatatttaatcatgtcggtcgctacactaaagttatctacactaccgaagttatgccacaatcctaaagagatgagaggcagttgcaagccactcttgccacagtatttatattgcatgcgatcgtagcgatcagtagccggctgattattcaatgggtaatccataaggttcaatgttttttcgttattgcaaagaaagagaaaatattttaataatgttccatcttattgctaaattcaaaggttgaaatcaaggaacaacgtccttcagtctgccagtaaagaagacacattctgatcaaaaaagacagatgatgtcactatactgacagtacgatggacggtccttggaaaaccaatcatacaaaccctaaaaaactatttcaacaagttctccttgaactctatttctacaatacgcaattcatggccggtcttgtccccatccttcgctttaaacaaatccagttcattggcaacgggggtggcaacttccactatttgtccaaaggcatctccttctttgcttgtacctttcagccggatggtaatttcattggtcagtaccggttttacatccaagtggacgtatcccagactcttatccgtatctccgctccatatcagttctttgcctgcatatatctccagcggataactgcgcatacgccatccagtcagtttcatacaaacttcatccacccgtgcggcacgttccaacttataggtaatccatgcggtagctgctttcccgtcattccgccattcgctcagttcattatcatcgaaactgttgactgtactctcattattggctccggcaatggcggaaacgataccgacatccacttttgagaccttgtatgaaggagtctgcggagtctcgccacgagtcagcctgccttccagtccatcaccggggatatagttgctcaaaccgtttttcacttcgacaggtgaggaagtaaggctgatttctgccggcttcaatccgtcggccttcgctgtgatacggacgtttccggcagtagtgagcgaacggatcaaagcacgattgataccgcattctaccggcaagtcttttgaaaggatataattattttctccttgtgcgatgccgccacgccattcggcaggtccttctacttcaaagtgtatcaagtcatttgccagcgggcaacggttgccgtctttatccatgacttctacctgaaacagtaccatatccgcaccatccgctttccatccttcgggactctggatgaagctcaattgaatctgttccggcttgccggcagtctgcaactgagtacggcaacattcttttcctttttcgtcgtatcctacggcctccagtctgcccggtacgaaagcgatatctttgaaggtatacagaaaatgataatcccgttcaccattgcccaaagacttaccattcagaaataattctactttatcggcactcgatacgacatataccggtttcagtaccgtatcattataattccaatgaccgacgatatagatgcgaggacattccgtatctacccagccgtcccacatcacctgatgtgcaaagaaaggatctttaggaatacgcatggcgtcagctactccgctacgacgataattttctactccgcgatagtgcgtattggtatcggagaagataatcttcacgccacccgaacttacacgatcacccgttcccggacgttcacgccagtaatcgaaccagcgaatgatattttcgatggtaaaggaatcctgattacggttgtagacacgggcatccactttcttctgtactttgttggtaacggtggacttataagaattgctgccgtctccatccttgtgataaggataggaataatcatcccagtatttgcgcaatccctcgtcacggcaatactccattgcccacatcggatgatgcgcactcttattgatatacagcatttcgcctccatattccgcttcgcggatgtccagcatttcacgggaaccgattgcacggccgccgtgaggatcgtacaaatcacgtatcactttcatctcaatcatgtgttcacgactgatggactcattgccgcattcataaaataagatactcggattattacggttatagatgatggcgtcgcgcatcaattccgtacgctgttcccactgacgtccttcacaatctttttcggcatctcccgcctgcatagcctgaatcaatcc

SEQ ID NO: 4671 - DNA, 217 bp, Unknown
  gut microbiota DNA sequence
gactcccggccattcattgcttgtccgctgggcaaagcccttcatctgaatgacacggtcattcagccagatcattcctttaccgaagcgcgttttacggaatccggtgcgggtggcaacttcgtccactttcctgccatctacccacaggcttgtctttactgtatacagatagccatatccccagctccagaaatgcaggttatccacttcggat

SEQ ID NO: 4672 - DNA, 33262 bp, Unknown
  gut microbiota DNA sequence
atgaataatggccttgcgcgatttcacacggatgtcttcggcatagatgtagactccggtcgttttgagattactatataaaggtaaagtctgatacagacggtcggtgacgtgcagccatacatttttggggataccgccataattggcattaaagttcttattgctccactggtatttcgtgcccgtcgcccgttctttataattccagtcattgtcgatgcggactgcgattacattttcctgtccgtacttaatataaggagtcagatcaaaaccgacagccatgacaccattctcgtgcaggccgacattctgaccatttatatagaaatccgccccttgacggactccttcaaactctacaaaaactttcttattcttgctgtcggcaggcagacggaaatgtttccgataccacataatcgtatcggtcagttcatcaatgctcaggcggaaagcctcatcttcattgaaggcatgcggtaaagtcactttcttccactccgaatcagaaaaacgcggctgctttgcctcgggaacatcgcccacataaagcaaccagtctgaattgaaattatatttattacggacatcagacgatgtcacgaactggcttattccgataaaagccaaaaagaaaaagaggattctatatctcatagtacgtctatttatctgttcgtggcaaagctagcgcaaaataccacacacgtccatagactaaaatacagattgcatagagatttgttcacaactgtttaaaaatgaatcaaacagtagtatctccattggggatgacccaaaagtcggtagtatctccattctcctccttcgggaaggaggagtagtcgaagaccgaggtggtaggagaaataatgtttgttccttttttattgaaaatgatagagtaatgtattcacctaccacctccccctatgggtactcctccttcccgaaggaggagatttaagatactattgactttttagtcagccccattcaagatactattgactatcatttaattcaaaacagtgtggaaagaaagctaaaactggaaataaataaacggctgaatctccgaactcttcatctgaatgaccagataaatcagagccaccatcagcagagctttccctaagaacggcaagcgaataactccacgacaagcagcattctcccaactatccggagtgaaatgaagcagaaagccgagcagcatcaaggcaaacacgcgccagtatccttcgatcaattgtgggaaaagctgcggacggaaagtggtgaatatctgtctcaacatatccatcgagttctgaaaatcggcattacggaagaatatccagcagaaacagacaaagtggaaagtgataatgactccgaatacacgacgccagccatgactttgttctcctttcttacgacctatgatggacatccacatcttatgcaccgccaaagcgatgccgtgaaatgttccccaaagtacaaagttccaggaagctccgtgccacaatccacccagaaacatggtaataatcagattcagatactggcggaacttacctttccggtttcctcccaaggatatgtacaagtaatcgcgcaaccaactggacaatgagatatgccaacgccgccaaaattcagtaatggaggcggacttataaggagaattaaagttgagattaaaatgaaagcccaacagcagagcgataccgatagccatatcgctatatccggagaagtcacaataaatctgcaaagcatacccgtatactcccatcagattctcgagaccggaataaagggtcggattatcaaagatacgctccacgaagttgacactgatataatcggaaatgattgctttcttgaacaaaccggagagaataaggaaaatcccccgcccgaacatctcctgagaaacgaaaagcggtttccggatttgcggaataaagtcacgggcacgcacaatcggtcctgccaccagctgcggaaagaaggatacataaaacgcgtaatccagtatgttggtcaatggcttgatgtctttccggtaaacgtcaatggtatagcttaatgactggaaagtgaagaatgagatacctacgggcaggaatatatcaagcgccgtaaattcccctcccatcaacgaggcaatcactccccccaggaaattagtatatttaaagtaggcaagaagccccagattgactcccagactcagagttaccaaccctttgcgtttccagcgtccttcggtacggtccatccattgcgccagcaggaagtcgcaaaccgtgaccagcgccagcaggaaaaagtaagtgccgctgctcttataataaaagtaataagagaaaagcgtcacaaacagaatacgggccgtatacttacgctgcaacaaggtgtatacgatcataaaggcggcaaacagccaaaggaagataccactgctgaatatcatcggtgcctgcggatcgtaggtaagcacctcttttaaccggctgaaatcaatatcaatgggaaacataatcgttataagcttgaataatggcttggtataataaatttccttgcaggatatatccctcaggtaaataatgcacatgatcgggacgcatcagtttcgcttccgtccagttggtacaggcacggcgcttgccccctactacatcgtacatatcccacacgagcagacgatgatctttggcataacggcgaattgtttctgccgctgtaaccgtccggggattgatggcgtacgtacgtttccgccgcctttgccggaaactttcgtaagaacccggaggcgtggtgagaagaatagggacatcgggaaggctgtcgcgcaacagtttgacaagttcgtccatctgattataatgcaggttgacgttataccgccggttatggctttcgttggttccgaaggacagaatcagcagttccggcttcatggctgcaatatcggcaatacgtcccggatgggtaaacgtcagacaggtagccccgttcacccccatatcggtataagagacagcaccaaaggtttctttcagcagcgttcccgtagtctgcggatagatgtgcccgcgtacgtgactgtctccgatatggagaatacgcaccgtatcttcggaaagtccggcacgtacctgacggagacgttcaaatacgggtgtcagcagggcaatgctgtcgattatctcattccttccggtttcgcggaaagcggaaggaaaagaagtctgcacggcgatggtatcattcgcccagttcatttcccgcaaaggttttatcattttcaaggtcttccccagtggaggacaggcagggatacggtcttgcgcctttcctgccgaaagaagaaagaatgttcccatcagtcccaagataaagcccagcaacaggttattcttgctcataagcacgcctcctgtcatattgttccttaccatatatcaatgtttcatagagcagtcctgccagatgtttgcctccccggaagttgatatgagtataatcgtagttcgccatcgaaggtttggcgtgtacgaggttcgccatactgccttcgcctcccatcgcttcaaacatattccagaaagcgataccgctttcggcagcaatgttctgctgatagcgaatcagattcttgactcccggcatggtacgaagttcaccatcttctgtcttataatcacggtcgccgacgcttaacagcaaaatactcgcctgtggaaaacaattcttcagatgttcgatagaagtgagcagtcccttctgataattatcataattgcgtccccgttcggtagccacattcaatccgtattcaagaataatcagatcataaggacgctgctcgttaaactgacgcagcatttgttgcggaatcccccgcaacgataagccggaactgcctcgcaaggagaaattatcaagaatgattcctttcttaccatccatcgccaagccatagaacaacgtagaatcggcacgatctaccgtccaccggacagagccgatgcgtccttcaacggaaatcttctgcaaatcgcccgaaggcgctaaggaataattcttactctccccccgattcacacgggcagtaagatgaacggaatctttattatagaagaaaatcgaagcctgctgacaggtatcaagcagcgaagcatatttgctttgccccctcaactcaacgtatgctccttcacggggaataaagtaatgtccggaaataccctgtttctttttatcgaaatacacactgtccgtcaccgcatgactggaccacccgccgaaagtatgccgcacggtaggacgatacccgctcgtcatcgaagttattgtgacaaatccgacaccgcaaccgccaaaccgcttctgaagcatttcacgtaaatcagccgtaaagatatccgcctctataaatgaatcaccgaaaacggcgatacgtaccagcccgtcatgatctggatgtgaagaagaagtacggtcgagcgcttcataaaaagaagccataccgcgacgggtagagtcaccgtaatcttcaatgcaagtcatgcccgcacgacaagtatcgacaaaaaccggctttacgacaggaggtaaaggaatggtatccgaatcggctaccgccacttcctgcttcggatagcgaagatcgcttaaaagatcgacacgcctcatcgtgtgtccgtcgatcgttatagccggaagccaatgcaacccaaagagtgctgcaaacacgatcagtacaagccataacgaatatttcaggtagttcttgataatctccatcttataagtagatataagcactcattgagtcctcgttttttacccggtgccgagccacctcctcatcggtgccgaaggaaggcctcatcggtgccggaccacaagttcatcggtgccggacgttttcaggctgcaaagatagggaaaagcaagaaaaaagaagggagaatctacattatttatagattctcccttccgattatttattcactgttcgaacgctagatggttcgttcaatgttccatacaaatgcacgtaatcccagctgttcggtctgcaagtccatcttatgtagtgtatccagcaacggatcgactttattgtcatcgaccaccgtaaggatagccgaacacatactgggccaggcatgactaccgaagtgcggatcgcctgtctttgagccacgtccctgcaccttttcaaggtatgtaaagccccggcagttcagacggtcgagcaatgccatgatccgttcgtaatacgcctgatcgaatgttatcaatactgatttcatatttcttttctgttatttcttaataatttcatctttatgttcctggaagtagacatccagttcgcgtttacgatggagtttacgacgtctgttcttgatacctgttccggcaaatacacagtacagcgtaggaatcaggacgagtgtcaacacagtagataccgtcagaccaccgattacggcaatcgccatcggactccacatctcagaaccttgtccgccaccgatagccatcgggatcatacccagaacggtcgtggctgttgtcatcaataccggacggagacggctcttaccagatgtcaccacagagttgatgaccgccataccccgctctcgacagagcgtgatgtagtcgatgagcacaataccgttcttcaccacaataccgatcagcatgatacctcccagcaaactcattacactcagcgtactgcccgtaaagaacaacgccatcaagactccactaaatgcaaacggcagagagaacatgataatgaacggataagtcagagactcgaactgtgccgccattacgatgaatacaaggataacaatcaggatacccagtgttcccaagtcgcggaacgagtcctgctggtcttcgtacgaaccggaaatctgaatcgtgatttctcccggaatatccatcttatcaataagtttgttacctgctgccactacgtcacccaacggagcaccggagataacggcggatacggtcacgatacgttcacggtctttacgctcaatggtaggaggtgcaaaacgttcgactacctttccgacatcttttacacgcacggactcgcctttggcattataaataaggatgttctcgatgctttccagacttgtacgatattcgggtgcatagcgcactttgatatcatactcatctccgtcttcacgatatttggaagcaacggcaccattgatacgattacgcaggtagttaccggctgtagccaggttcagtccgtgcatcgccagcttctcacggtcgaagtcaacctgatactcgggctggtagtcgctacggctgatgtttacctcggtcactcctttcacggtcagcaactcacgtttcaaacgggctgccacgctatcggtcatcgtcatatcgtatccgtatatctcaaagtcggcacttgcctgagcagacatacctgtattactacctcccagaataacctgtgccttgctgaactccggataacctttcaagtcctgacgcatctcgtcgcagactgcttccagcgagatatcacgatctcccgggtccaccaaactgatattgaaggagataatgtgcgaaccgttgtcctgcatggaagcccacgtattatccgagtccgcctgacctacggtatagttacataccttcatgatatctttatacttcgtcagccactggttagtcaacttctcagaaagttcctgtgcaatctcttttcgtgtaccgatcggcaattcaagctgaacagcgatacgggcattatcctgtgcagggaagaactccgtaccgattcctttcgcacacagcaagctgactacgaagaaagcaatacatcccacaatcacaatcggacgatgacgaactgcccagttcagcatcttcgcataacctgtatcgagtccgtccaacgctttctctatcggagtaaagaagagcttgaacatcttcgaaggccgcttttgcagacgaagtaattgcgaacagagcatcggggtcagcgacaacgccgccacggtagacacaaacatgatggcacacatcatccagcccaactgcttgaagagcacaccggacataccgcttaccatggtcaacgggaagaacacggcgatcatggtcagcgtagaagcaattacggaaatagccacctcattcgttccatgtactgctgcctgtttcgggtccgaaccacgctcaatatgtgtcgtcacgttttcaagtaccacaatcgcatcatccaccaccataccgatggcaatagacagagacgacagtgagataatgttgatcgtatttccggtaatcgccagatagataaaggaggcgatcaacgaaagcggaatcgtgatacagataatcaatgtcgcacgccagcgtcccaggaacaggaacacgacgatcacaacgaacagcaaggcatacattacagtctctgccaaactgtcaatcgtattcaagatattatcggaagtatcgacaatcactcccagcttcacatcactcggcaggttcttctgcaaacgcggaagcgcttcttctaccttacgggaaatttctacagagttggcgcccgactgcttctgaaccacaatcatcgcaccctgcacaccgttattataggtttcctgcgcacgctcttccaccgtatccacgatgcgggccacatcacgcaggaagacattcgctccattgtgcgtacctactacgatatctgccaactggcgggaatcatcaaactccccttccacacggagggcatacgtctcactaccgatatcgaagttaccgcccggaatattcttgttttcggctccgataatagagctgatagtttcaatgctcaggttataagcttccagtttgttagggtcgcaatatacctgaatctcacgctgcggcgcaccactgatagacaccgttcccacaccgggaatacgtgccaacgggttaaccacacggtcgtccagtatcttgtaaagcgcggcctggctctcattggcctgtaccgaaagcaatacaatcggaatcatgtccgtactgaacttgaagatgatcggattctcgacatcatccggcagctgtgagcttaccatgtcgagtttgtcacgtacatcattcgtcagcacgtcaatatcattaccaaactcaaactccaatgtaatcaatgacatattctcggaagaacgagaggtaatatgtttcaggttactcaccgcattcaaggtattctccagcggccgggtaacgttattttctatatccgaagcacttgcgccaggatatgcggtcattaccatgatcgtatttgtatcgatgtccggatacaagtcgataggtaacttggacaaagagaaaagaccaaaaatcaccactgccagaaagcagagggaggtcataatcggtttcttaaccgcaccttcgtataaactcatttctttatagtgattagtttaatagtgattttacttctcgatctctacttccgtaccgtttatcagacgtgcctgtccggccactaccacctgcgagttatcgggcacaccggatttcagctcatactccgagcccatgcgtctgcctaactccactttgttgtaggacactttgccatctttataaacgtacacatagcgatcgccggaacctgcctgtttcacaatagccaagtcgggtactacgacgttgtccgccgtaccgaagttcaaggtagcacgggcaaacattcccggacgtacacgctgatctttgttgtccaacttgatctcgatctggaaagtacgggtagttgcgtcgatagtcggatagatcaggctgatagttcccttgaacagttcgtcgccatatacatccagcttcacatctaccggttcgcctttcttcaccttcgtgaagtaggtttcagacacattgatcatcagcttgaccggagtgatctgctctactaccagcaccggacttccgccactatacatatcaccattatcgtaattacgggcagtgattactccgttgatcgggctcaacagaaacgtattctctaccagattatcataagcagtctgcttcacatcgagctgcatcttcgcagcatcccactctgatttggaagcaccgcctaccttataaagttcgtcgatacgattaaattcaattttctgattgtccagttgcagtttcgtctgtgtgaggttggctgcatccatctgcaccagcttctggcctttggatacacggtcgcccacttctaccagaatccggtcgatgcggacaggtgacgaaggagcaatgttgttctttacttcagcttctaccgtcgctgtataatcctgtatctgatctacgggacgggctgttacatcagccacttttactctgggcttctcgtcttcctgtttcacagcagccttatcttttccacccgtacatgagctcattactactgtcaatagcagagccactaattggataccttttttcatattccttagttgtaattttagttgtctatctttattgttttcccaaaacctgatcaaggtcagccttagctaccaggtaatcgtagattgattgattgtaagtaagttgtgcctgcgtcagtgatacctgcgaactgttaagttcaagcacggttcccttaccgacttcataacgttttccggcaatctgtaccgctttttcagcctgcatcacgttttctttgttgctgaccacctgctcggaactggcagtcatattgttacggtagctgactacctgcatattcagttttctctccgtatcgatacggttccagtcaagctggcgcatctggatgcgggccgattttaccttcgtaaagttgctcgccctatacaaaggaatgctcagattgaacatcaaagacgaactgttgctccacgtataatcaaagaaattgatgttcggattatacaaagactgatattgataagagaagctcatcgacaaagtaggcatgaagttcgttttcagcgacttcacgttcttttcgagcaatttcatattcagctcgaactgcttcatcgttgtattgttctccagactcatatcttcttctttcaactgattggcaaacagcattgattcgtagtttgtcagattatcgtcagtcttaatatccacatcagccgtaatgcccatcaacactttcaactggagttttgccagcgtcacggcattggcggcagaaatgacattcggcttgatgctgcgcatctgtacttctgcgctgatcttgtcaaattcgctgactgcaccttgttgatatttggcgttcacgacattgaaattatcttctgccaacttatagctgccttgaagcacttcataactatcttgtgcaagcatcagctgataataagccttggttacctgattgatcaaatccagttcggaagcacgcgacttctccactgccagttcgatatccgtctttgtcattgacatggcccggtagactgccggtgcaaacaaaggcaggttaatgctcagtccggcattggcggtattcgtaccatcctgccccatcttgaacgacatatcgttcagtttcatttcagccgctttgatcgtgtgatccaatgatccgtttaggcttgcttcgggtaacaggctctgccatgcttccttacttgcaactttctttaaggcaatttcttctgccgccacctttatcgtaggattctcatccaacgctatttccagggctttgtccaacgtcaatgtcagcgtattctgcgttgtctgctccgtctgagcctttgcaaagccaaacgcacagagagccattgccgtcagaagcattttcttgcctgtcaatcttttcaatctgttcataaactcgtttctatttgatccttaattgtttgtcatccgaacctagctcctattgttgctcgacccggtttttacgatattctgatataaattcctctaaaactttggctcctttttccgtggaaatgccacgtatataggtaaacatgatggattcgtatacttctataaaaggatattcgttgcaaatgtccgtattcaacagcacatcaaactgctcgcgcaccaacagattgactatctcaaagttgacatccgcccgaaagataccttgctctacccccgacttaaagaaagacatcgtcttctccgagtcactttcactacggtctttcatcatcgcatataccttcggatatttcttgatatcctcgaagaagcgcttgttggtctgatgaaagatctcgatgcttttctgaaagacagcaagtatcacctccagcacattgttggattgctcgtatatctcctgcaagtatttgtctctttcggcttgcttttgcagaatacactccttcaataatgattccttatctgcaaaaacctcatagagcgtacgtttggaaatgcccaatgctgccgcaatgtcatccatcgtaatacacttgatacctttcaaagtaaaagcttctgtcgcggtcattataatccgttctctcagctccgccttttgggacgcgtctcttccatgctccatcatcactctttttagattttgttagactcagttttctataaattcaccatttaaagcgaaaaacggaacaaagatatatagaaaactcaattaacaaatcaagtttccttttatttatagcccatttgataaatattatcattcattagaggtatatgaaaacaagtgttaagaggaaatatagagcaaaagtaaggaatagaggtatatgaagtaaagttttatcgctgtaagagggagaataatcggcaaatgccggataaataccgataagaatcgatcgtttatccggcaataacagtcaccattattaacgaaaagcgaaaaaggaggtttagtactctaacttagtcctttttaaaaaagcgactgttttatgtatttctttatacatcacgatgtcatctttcacaaaaggcacttctttccggtaggcatgcaggaaactctccagcagcggagacgttttcagcggacggcggaaatcgatgccctgcgcagcattcatcagttcgatggcaaggatatgttcaaggttgtccatcactttataaagtttggttgcggcattggctcccatacttacatgatcttcctgcccgttggacgaaacgatggaatcgctcgatgcggcataacagtacattttgttctggctgaccatagacgcagcagcatattggggaatcataaaaccggaattcagtcccggattggctaccaaaaactccggaagttcgcgaagtcccataatcaattgagagacacggcgttcggaaatgtttcccagttctgccaaggcaatggctagaaagtcataggagatagccaacggctgaccgtggaaatttccaccggaaatgattctgtcttcgtcagggaagatcgttggattgtccgtgacggaattgatttcggtcagcagtacggaggaaacatagcggatagcgtctttcgtagcaccatgcacttgcgggatgcaacggaaagagtaaggatcctgtacgtgcgccttgggacgttcgatcagttcgctgcctgccagcagtttacggaaagcctctcccgtctcgatctgtccgggatgagggcgtatctgctggatgcaatccataaacgggtcgatgcgtccgtcgaaggcttcaagagaaagagcagctatcaggtcggctttcttggaaaggcggaaggctttgagaatggcaaatacaccgttggcactcatgaactgggtaccgttgagcagtgcaagcccttccttgctcatgagccgaacgggttcccagccaaattcgtcgagcacgctgattgcttcgcatttctttcctttatagttgacgtcgcccacaccgatcaaaggaaggaacagattggctaatggggcgagatcgccggaagctcccaaggaaccgcgatcatagacgatgggcagtacgtcgttattgaaaaagtcgaggatacgctgtacggtgattagttgcacgccgctatgtcccaacgagagagcgtgggctttgagtaacatcatcagtttgatgatgacaggacggatttcttcgcctacactgcaggcatggctctttatcaggttttcctgcaaggttcccaattcgccggaagaaatatttttagtgcataatgagccgaagccagtggtgatgccataaagaggttcttcggaagaagctattttatggtctagataatcacggcatttctgaatgcggagcttggcttcgggagccagttccagcttcagattctcgttgatgatccgttcgatgatttcgaaggtcagttctccggaacctatttgatacacattcttgctcatacgcgtaaatcttggttgacggcatccagtaattctttctctttccggcaagcggtttgctctatccggtccgcttcggcttgcaagccctggacaaattctttgtctttgagtacccccagattaatgcggacattcagcaatgcccccaatacggcggatcgtgccgccatcatggctacacaggcgtctgtaatagcgttccggtttcccagacgggcgatgtctgctatgacgggcatcacttcgagtgcttttcgggcaacttccatcggaatgagggcggcatgcctggtggcttcctgaatggcagcgctgcgggcagctttttcttcatcggtagctttgggaagtttaaaacaggcaaaaacttcatcataggcttcggagtctttatcaatcaaggcgatgaattctttttggaatcgggtggtaagcgtctgtgcgtgctgcattacttcttcactggcttcatatcctttcttgccgatggtgagtctcgtcaccatcgtggccaaagcggaagccaatgctccgcctaaagcggcaatactgccaccgccgggtaccggatcattgccggctaccttatctaagaaatcttttacggttaaatctgctaacatggtattttatgattttagttatcaattgacggggtatagcataccgcctttaatagtcatgatgacacagttcatgcccacgtagtatggcagaatgtgataattgtccgaattcagtatgacaaagtcgccttgcttgcctacttcgatgcttccgatccggtctgcccgatgaagggcagcagctccgttcagtgtcagggcagtgatggtttcttcgatgctaagtttcatgtaaatacacgccaaagcaatggtcaacgggatggaaccggagaaacagcttcccggattcaagtctgtggcaagtgccacggcacagccggcatcaatcatttcacgaccgcgtgcataaggttctttcagtgcgaaagccgtcagaggcagcagggtagctactactcctgcgtcggccattgcacggattccggcatcggaagcctgaagcagatgatcggcagacaaagcgcccagttcggcagccagctcagcgccaccaaaggaaacgatttcatcggcatggagctttaacaggaagccttgttctttggctgcccgaaggagacggcgggactgttcgacagagaaaactccttgttcgcaaaagacatcacaacattcggcaagttcgttctcgcggataacggggagcatttcacgaatcagaaagtcgatgtattcgtctcctcttcctttatactcttcgggaagggcgtgggctcctaagaaagtggatacaatgtcgatacgtttgtgctcgtcattgttcaggctgcgcattattttcagttgcagcagctctgtttcccgatcgagtccataaccgcttttaccttctaccgtggtgactcccatagcactcatcttcttcagaaagccttcggctgccgagcgaagtttcaggaaattcatttgccgggtagcttttacggtactggctatccctccgccacgttccatgatggacatatagctttcgcctttcagccgccatgaaaattcttcggaacgttctccgccaaaaacaaaatgggtatgcgaatcgacaaagcccggaagcaggcaatgtccccgggcgttgtaatgccagtaatgctggtagtagccgtcacgatcttcgccacgactctcgccgacgtaagtgatgatgcctttggtcacttctaccgttccgttttctatgatgcggagttgtcccatttccgcacctttacgggcggagattcctgtcggggtgacaatacgggcattgaatataatcaggttttcactcattgatcttttattattcggttcttactatttcaatcataattcgatataagtttcagcagctttatatcggacgcacattattttaatactccgggtgctattccatgatacgcgcttccaacacctgctgcatggagaaattctccagtcctaaataataggaggccgtatctatcagcgcttccatcggcaccagaccaatgatctcacttccaacaatcgtcactccatagcggcgggcctcaatacgcaccaattcgaaagcacggtaaagggcggtgcgggtgtaatcggtcatattaatggatacttgggtgatattccgctctttcagttccacccccattgctttgacgtagcggagaccgccgttgatatgccggatattctttgctatcttcgtggctatttcaagattattggtactcagattgatgttataagcaaccagcggcattcgggcaccgatagctaccgttccggcagtgggatgacgctcggcagggccgaagtcgggctgccattcgggaagtctgattttctccgccattccttcaaattctcccttacggacggaggccagattttcccgatgcggggctgtggcggacttttcatacagaaagacagggagattatatagttccgccactcgggaagccacttctttcgacagggcgacggcttcttccatcgtcgtattcttgatcgggatgaaaggaaccacatccaccgctcccatgcggggatgctgtccgctatgatgattaaggtctatcagacggacagcaatgccgatagcttcaatgactgcatcgcgcaaggcttccggttcgccaaccaaagtgactaccagacggttatgatcttcatcattgctataatcgagcagcttcacgccggatttgccacgaaaaggggctactatcttgtctattttctccaaatcacgtccctcgctaaagttggggacacattcgatgatcttactccaattcatatttatttctctatttcgttactttctattacaatgcttcttttattgtctttttaatcagctcgtcatcagccagataaggcatcgttatatgatacccttccgaatgtgattcattgaaagcgtcactagtttccattgcatgcggattgcgggcccacgaacggcgggccactccgcccatcacatcccaaagcatagccgagcgaagtatctcgtctacccgttcgctgccgtcacataccatgccgaagccgccattaatcgcttttccgatgccgactccgccgccattatgcagggctaccaggctcatgccacgggcgcagtttccagcgaaacactgcacggccatatcagccatgacattacttccgtctttgatattcgatgtctcacggaaaggagaatcggttccactcacatcgtgatgatcacggcccaacataatcggtcctacttctccccgccgtaccatttcattgaaacggagggcgatattcattcttcctacggcatcctgatagagaatacgtgcctgagtacctactaccagcctgttcttttcggcgtcgcgtatccagttataattatccagatcctgtccccggcgattgacatcaatgcactccattgcggcacggtccgtttttatcagatcttcgtgcctaccgctcagacatacccatcggaaggggccatagccataatcaaagagttggggtcccatgatatcttctacataactcggccatataaatccgtctttctcatcaactccattgcgggaaatctctttcactccggcatcataaaccgctttcataaaggagttgccataatcgaagaagtaagtgccgcgtgccaccagtttccggattacctcaaaatggcggcgcaaagaagcgtctgccagacgacggaactgatcaggagattcatgaagaaggcgggtccgctcttcgaaagtcaagcctgcgggacagtagcctccttcgtaaacggcatggcaagaggtctgatcggacaaaagttcaatatgaatctgctcacgttccgcatattccagcaaatcgacgacgttgccatgataggctaccgagcaaggtccccgacgctccatcgcttcttttgccagacggaaagcctccgacaagtcttgtgtgacatggcctacccatccctgccgataacgtgtttcgatacgggagctatcgacttcggctataatagaggctgctccggctatttcggctgcctttggctgtgccccgctcattcctcccaaaccggaagatacgaagaggtgaccacgcaaatctttgtcctgcggaatgccgagtttcaatcgtccggcattgagtaatgtattgaaagtgccatgaacaataccctgcggaccgatatacatccagccgcccgccgtcatctgcccatagttggcaactcccatttgtgcggcaatgtgccagtcgtgctgattgtcgaactgacctatcatcatagagttggtaataataacgcggggagcatcgggacgggaacgaaacagtcccaacggatgtccggactcaatgaccagtgtttgctcaggagtaagttcttcgagatattgcttgatcaggaggtattgcatccagttctgacaaacttggccggtttcaccataagtaacaagctcatagggatacaacgcgatatcaaaacagagattgttgtcaatcattacttgaaaggctttgccttccacacatttgccacgatattcatcaatcggtctggctttcagatcgcctgcggggcggaagcggtatccgtaaattcgcccacgggtacgcaattcttccataaattcaggtgccagttgctcatgcaattccaaggggatatagcgcaatgcattcttcaatgccgtagctgtctgcgccggcgtaagcgtataactacggtcgggggccctccggataccttctatgaaagctgggtagggaggtaacgtgttgccaagagttatcttcataataagcagaattaaggattacaaactgtaagcaatacagttctataactcttcgcaatatagaaaaaaagaagagaaaagacaaaggttttggtagatttattatcagaaaggtattatttattctttctgctgctcaccacacagcatttgcagatacttgaaggtatgcttcgcttcctgactgtcttttgtaaggtaggcttttttccattccggatgtttttccagcagttgcgccatcttttcttttcctacaaaatcaatctttccggtctcaccgttcagctcatagcagacccgtttagtaaccagacttgaagcagcaagagcatctcccacatttccgcccagtttcacatcgtcttcttctgcaaatgtcccaccgattaccgaccctaatggcatcgcacagaaatagatatttttgcccaactgaacagccggagcataccacgccccgaaacgcatctttttataacgcaacttacgacagttgataaataagtctccttcagaagtacgcaccgcaaaacaacgcttcttcaactggcggcacatagattcatcattgcctgccgttatccggtagtcagccccgcctgtcaatagaatctggcttctggaacgcttctctactcgcaacactgcaagggtatcgccatcttgagccatcaactccttcaagtttgaataaatgatattctgcgcaactaccggaaggctaatcacgcttatcagcaaccacaaaatatatcctttcttcataagccatcctcctttcttcattcaacgccttttcgagtggaaagttataaattttagcgcataaatgcaagaatggaaaaagaaatgttgaaaaaagaagccaagaagcccctttcgccttcttggcacagcacctcttacacgcaattatcccggaagcaagtcaatcgcccccgaagttcgtttactcatgagatacggtttatggttctttttataatcttatcttgtcttttttcatccggaatatcaggcgttaatacctgagtcgtcagggttgactaaaaagtcggtagtatctccaattcccctcccttcgggaaggagaagatttaagatactaccgactttttagtcagccccatatcaactatgaaagaataagctcccgggaacaacagcaaatgaacgattcattatgctattatgcaggcatgattaatatattccgtcagtaacaataaatcgtttcacgtacatgctcccatcagtccacgtacgtaaactattgagctcacatacgtgaaccgaacagatcacggacgtgaaacgaaaatatgaaacgaacaaaatatattagtcaaaccttgtttacaggttaaggttgccgagtcttgtcttaatataggcggcatacaggaagtaatatatggcataaacaacgtacattcatgcctaaaagggagttcttaacataaataggcaaaggctttaaaacagtgcacttaccactgataatcagcaaattaaccgtattatctattaaaaacaggtgataatagaaagcagaaaaacatctattatcaccttattatcaccggttattatcaccattacttgactaattataagacacttatcacgcaaaggtgacaagtgacaataacaaagtgtgtttatttcctatgtaactttgctctaaaccatcacaacttgcttcatcaccgattactgaatgaccgttaataaagagtaaatctgctctttacaaaaacacgctcccattctgccttttacgaattatattacctttgtccgaaaagcaatataatcgtatggaaaaacaagaaaatattatagcaacctatcaacaaatcattcaggaaacagaacaacaactacaaaaagcgcggaaacgcattcgctatatcagccttctgagactaatcttattcgtagaagcagtagcctccgctattattttttggtctgatggatggttaaagctcatcgtctttaccgtaattcccatcatcgctttcatttggctggtgcaaagccacaaccgatggttttactggaaagattatctcaaaaagaaaatagaaatcaatcagcaggaactacgagcactgcaatatgacttttccgacttcgacaacggaaaggaatacatcgatccgtctcacctctatacttttgacttggacatatttggcgagcactcactattccagtatatcaatcgtacttcgacccccatcggcaaacagcgtcttgccaactggttcaatgcacatctggaagaaaaagaagctatcgaacaacgtcaggaagcgattcgggaactatcttcagaacttgagtttcgacaacaattccgcctgctcggattactttataaaggcaagccatccgacacctctgcaattaaagaatgggtaaacagtccgagcgactatcggaaacacgctttcctccgtatcctcccgacagcagtaggtattataaacctcctgtgtatcggcgcaacgattctgagatttctccctgcaagcatcagcgggatagtatttgcatgctttgtcgtattcagttttatcttctcaaaaggaataaccaaaatacaagcgacgtatggcgaaaaactacaaattctgtctacttacgccgaccagattctcatcaccgagaaaaaagagatgcacagccctgcattgcaacaactgaaagccgaacttacaagccaaaatcaaacagcttcccagtccgtacatcgccttgctaaactcatgaatgcactcgaccagcgaggtaatctgctaatgagcaccatcttgaacggcctcctattttgggaactccgccaagtcatgcaaatcgagaaatggaaagaagcacactccgcagatcttccccgctggatcgaagctatcggagcaattgatgcttattgttctcttgcaacattctcatacaaccatccggattacatctatcctcaaataacttctcagtctttccatctgcaagccgaagccttagggcatccgctcatggaccgcaataaatgtgtccgcaatggaatcgatatggagaaacgcccgttctttatcattattaccggcgccaacatggcaggcaaaagtacttacctgcgcaccgtaggtgtcaactacctcttggcttgcattggtgctcctgtatgggctgcgaaaatggaaatatttcccgctcgtcttgtcaccagcctccggacaagtgattcactcaccgacaacgaatcttacttcttcgccgaactcaaacgactgaaactaatcattgataaactcaaagccggagaagaattatttatcatccttgatgaaattctgaaaggaactaactctatggataaacagaaaggttcttttgccttaatcaaacagttcatgagcatggatgccaatggtattatcgctactcatgacctactgctaggcacactaatagatgcttttccacaaaatatccggaattattgtttcgaagcggacattaccaacaacgaactgacattttcataccagatgagaagcggaatcgcacagaacatgaatgcgtgcttcttaatgaaaaaaatggggattgccgtcatcgacggttaatccccacatgtcaaattattccttaaagcctgcttgtatctaagctattaagacatagaagtgcgatattcagtaattatcaatccattatccatttatccctgcatccctgcacttgactatcttagaaatgatcttctgatgaatgacaattcgccatcaacatgaataccatttggcattaagcactttaattcaattgacttttagtcagaaacgcagcaacagctgcagctgcatcattggtaaaataatgcacagcagtcaccggctgatatgtataaggtacaaactggaatagctgtacagctgcaaatttattatcagcagatagtatcacgtccatacgtatattaccacttgcctcactcttaatctttgaatccgcagaaaatgaaccggaattaacaaggtcagtcaacttgtccatatgcttcagatcaaagaaaatactacgctctttcgctatgcttcctgtcggtacataaaccacttcttttgacttccagaaaagccggaatatacctaaaaggaacaatcctgttccaaagaccatcagagccatactgacagtagacgatttatcttccagttcaaaagtagaagcaaaagataaaataccaatcagtaacattacacaagaaattaaaagaccggagatactcgtacgtttagcgatatcgggatgtgaagatgcaaatatagtagcatcaatagcttgagttgccataatattgaagtttaaattattagtaaaaatatgaagataataaagactgaccggcactatataattaacgccagcaatccgtaaaataataccaataaataaacgtctaaataataatatgccttaaagtaaatacataatattcacttgcaggctggcaataataggaagttgtagtattataaatccttccccaatgctgtgacagcgagttatcacggtctgcacaacattgcagcacatttctcagagaagagaagtattcaccgatttgcacacgttggatgcgtgtcaccgatatctgatggctttgcaaattagttaattcagccacaggaagataaggagattctggagcattaatctgcccctgcggtttcatagaatatgtaacagcatgctctggttgttccacctgcttttcagtgaaaacattgcctgcgaccccatgaagggcaaccgccagcaacagaaacaatattacctttacaaattttgccatattctcctgcaaatataacagataattcttacgaaaagttcattcggtaaatcttttaatgtatcttagtataactaaaatataaagatacaaaaaaggctacccgtgtgagtagccttttttatatgtatacgaataactttaaaattattcagctgattcagcttttggttcttcagttgcaggagcttcaacagcagcaggagcagcagcttcagcactcttcttagaacgacgagtacgagtagctttcttagcaactttttctttagccatgttttcattgtagtcaaccaactcaatgaaacacatttctgcattgtcacctaaacgattaccagtcttgatgatacgagtataaccacccggacggtcagcaatcttaaccgagatttctttgaacaattctgttactgcaatcttatcttgcaggttgctaaatacaacacgacgagaattcgtagtatcttctttagactttgtaatcaaaggctcaacaaacttcttcaaagcttttgcctttgccacagtcgtagtgattcttttgtgcttgatcaaggagcaagccatgttagataacatagcgcttctgtgagaagcagtacgacctaaatgattgaattttttattatgtctcattttttattctttatctaatttatatttagaaatgtcggttccaaacgatagattcagactttccagcaaatcatcaagctcggtaagcgatttctttccgaagtttctgaacttcaacaggtcagttttgttgaattgtaccaagtcgccgagagtttctacatcagcagccttcaaacagttgagggcacgaactgacaagtccatatcaacaagcttagtcttcaacagctgacgcatatgcaatacttcttcgtcaaactcttcattgccatcagtatcgttactttcaagcgtgatcttctcatcagagaacaacatgaagtggtagatcagaatttttgcagcttctttcagcgcttccttcgggtgtatagaaccgtcggtactaatctcaagcactagcttttcgtagtcagtcttctgttctacacggaagttttctacagcatacttgacattacgtatcggtgtataaatagagtcgattggaattacattaacatccgtgcaatattcgcgattttcatcagcaggaacatatccacgacccttgttaattgtaatatcaatctgcatagttgccttagaatctaaatgacaaataactaattccggatttaacacttcaaatccagtcaaatacttacctatgtcacctgctttaaattcacttgaattctcgacagtgatgctcactttttcgctctcgaattcttcaactacttgcttgaatctcacttgtttcagattcaagataatgttggtaacatcctcttttactccaggtacactagaaaattcatgctccacaccatctattctgatagtagtgatagcaaaaccctctaatgaagagagcaggatacggcgtaatgcattacctacggtaataccaaaccccggttccaacggacgaaattcgaatttaccgaatctggagtccgcctccaacattaatactttatcaggtttttgaaatgctaatatcgccatgaaattaattattatttagaatacaattcaacgatcaaatgttctttaatgttctcaggaatgtctgctctttcaggtatatgcaacattttaccgaccttagaagtttcatcccactccaaccaagcgtatttgctgtgattgaaacctgcaagagagttagcaattacttccaaagatttagatctttcacgaacaccaatcaattgtcctggttttactgcgaatgaaggaatgtttaccacttcaccatctacagtaatatgcttgtgactaaccaactgacgagcagcagcacgtgtaggagcaatacccaaacggaatactacgttgtcaagacggccttccagcaattgaagaagcacctcaccggtaatacctttagcggtagcggctttttcaaacaaattgcggaattgtttttctaaaactccataagtgtatttcgctttctgcttttcacgaagttgcacaccatattcagaagtttttctttttcttgaatttccgtgttgtccgggaggatagttcttctttgacaaaactttatcagctccaaagatgccttcaccgaatttacgggctattcttgattttggtccagtatatctagccatttcttttaaatatttaattgtttattcatgaactcaatttgttgcagccgcgattgcagagaagaaattattgcaatccaaaaacaaaatcaagatcattttaagttaaaggtaaattaaactctacgtcttttcggaggacgacaaccattgtgtggaagtggagttacgtcgatgatctctgtaacctcaataccagctccgtggatagttctaatagcagactcacgtccgttacctggacccttcacatatgcttttacctttctcaggccaagatcaaatgcaatttttgcacaatcttgggcagccatctgagctgcataaggagtattcttttttgaacctctaaatcccatctttcctgcagatgaccaagagataatctgcccttcactgtttgcaagagaaacaataatattgttgaaagatgaatgaacgtgtaactgtccattagcgtctactttcacatttctcttcttagctgcaactgttttttttgccatatcaacaattattatttagtagcttttttcttattagcaacggttttctttctacccttacgagtacgtgcattgttcttagtgctctgacctctaaccggcagaccaatacgatgacgtacaccacggtaacaaccaatatccattaatcgcttaatgttcaattggatttcagaacgaagatcaccttctactttatactctgcaccgataatctcacgaatcttagcagcttgatcatctgtccagtctttaaccttcagatctttatctacaccagctttatctaaaatttttgctgaactactgcgacctattccatatacataggtcaacgcaatttcacctcttttattctgaggtaaatctacaccaactattcttatagccatatactaaattattttttttgcaaaaataacaaattatccttgacgttgtttatacttaggatttttcttgttaataacatacaaacggccattacgtctaacgatcttacattctggcgtgcgtttctttaatgatgctcttactttcatatcttaattttatttatatctaaacacaattcttcctttcgataagtcgtaaggagacatttcgactctcactttatctcccggcaagatcttgatgtaatgcatacgcatcttacctgaaatatgtgcagtaatctcatgtccgttttctaattcaacacgaaacattgcattagacaatgcttcaactataactccatcttgttctattgcagattgctttgccatattatattgctttatctcctaaaacttcttctatgaatttgaatgaagacaaaatatcagcctcaccagctccaacagctaccgtatgctcaaagtgcgcagcacatttacgatctctggtcctcacagtccatccgtcaccttccataatcacttgtctgtctctcaacgttatcatcggctcaattgcaatgcaaagacctcttttcatcaaaggaccatatcctcttttaccataattaggtacctggggatcttcgtgcatttccttaccgatgccgtgaccgacaaactcacgcactacaccataagaatgagactcacaatattgctgaatagcatatccgatatctccgattctttttccatgcactgcattctgaataccgatatataacgcttctttagttaccttcaacaagttacgaatttcttcgtctacctctcctacacaaaaagtataagcagaatctccacaaaaaccattcatataagttccgcaatccacagatacgatatcgccgtctttcagaacaatatcccccgggattccatgtactacctgctcatttacagaagtacagatggatgcaggaaacgggtctccatattgattcgggaatcctttaaaagttggagttgccccattatctctaatgaattcttcagcaactttatccaactcacgtgtagttacaccaggcttcaccactttagcaacctcagctagagttctaccgacaagcaggttactctgacggagcaattctatttcatcttctgtcttaagaaatatcatttctattctaaagaattaatatgccgctacaccagcgcgtcccttaatacgacctgatttcaacagaccatcataatgtctcatcaacaaatgactttcaacctgttgcagtgtatcaagaacaacacctacaagaattaacaaagatgtaccgccgaagaattgagcaaatccagcttgaaccccaaatataccagcaaaagcaggcataatagcaaccaatgccaagaaaaaagaacccggtaaagtaatacgagacatgatatcatcaatatactctgctgttttctttcccggtttgataccagggatgaaaccattatttctcttcatatcctcagccatctgagtcggattgattgtaattgcagtatagaaatatgtaaataatataatcattaccgcaaaaacaaaattataccagaaacttgtatgatctgtaaacgcatgcaagaaaccgcctgcgttatttacattattggaaaaaccgataaatgtaattggaataaacatgattgcctgagcaaagattataggcattacaccagcagcattcaccttcaaaggaatatactgtcttgcaccaccatattgtttattacctacgattcttttagcatattgtacaggaatctttcttgtaccttgtaccaacaagattgcagcaccaatcactaacaataagaatacgacttcaattataaacataatcagaccaccactcttatttgctactctggatacaacttcttgtatcaaagcatcagggaaacgagcgataataccgatcaggatgataaatgaaataccgttaccaatacctttatcagttattctttcaccaagccacaaaataaacatactacctgctgccaaaataatggtagaggtaaccataaacagagtccaatctaatgaagcatttaaggaagggccagcctgcattttaagattgagcaaataagaaggggcctgaactaacaatatagcaatcgtcagataacgagtatattgattcatttttcttctgccgctctcaccttcgcgctgcaacttttggaaatacggcacagcgattcccaatagctgaataacgatagatgcagagatataaggcatgattcctaatgcaaaaatagaggcattagaaaatgctcctccagaaaacatatttaacaaggctaaaaggccttcacttgtttgttcgtgcaattttgccaacattgccggattaatacccggtaatacgacatatgatccgaaacggtaaattgccacaaacaatatggtgatgaggatccgctgtctcagatcctcaatcttccatatattctttaatgtttcaatagcttttctcattgaatcagagttttactacagttccaccagcagcttcaatagcagcagcagcactcttagagaatgcgttagcttctacttccagcttgttagtcagagctccgttacccaatactttaaccaattgatttgaagaaataaatcctgcttcaataaagtcgctaataccaacttttgtcagattcttagcatctgcaagcgtctgaattgtatccaagttgatagccttatattctacacgattgatattcttaaaaccaaatttaggtactcgacgttgaagaggcatctgaccaccttcaaagccaactttcttagagtatccagatcttgatttagctcctttatgacctcttgtagaagtaccacccaaaccagaaccggcaccacgtcctattctctttcttgtcttagtagatccttctgcaggttttaaattacttaagttcatattgtaattcgtttttttattcaacaaataattacttaacaatggcaaccaagtgttttactttatctaccattccaagaattgaaggagtgctttcgtgttcaaccacacggttcagtttgcgaagtcccagtgcatcaagagttcttttctgatcagctggagcaccaattctacttttaacttgtttaatctttatagttgacatatctcctccttatcctctaaatactttttcaacactaatacctctgttctgagcaatcattcttgcatcacgcatctcactcaaagcttcaattgtagctttaacaaggttgtgcggatttgaagaacctttagattttgccaaaacgtcagtaataccaacactttccaatacagcacgcatagcaccaccagctactacaccggttccgtgagatgcaggtttgatgaatacttcagcaccaccaaacttagctgattgttcatgaggaacagtacctttcaaaacaggtactttcaccaggttctttttagctgattctacgcctttagcgatagcagctgttacttcacctgctttaccaagtccccaaccgataataccttcttcgttacctacaacaacgattgcagagaaactaaaagttctaccacctttggtaactttagtaacacgattaatagcaaccaatctatccttcagttctatatcgttagtaaccttaactctattattaactcctgccataatgattaaaatttaagtccaccgttacgagcagcatcagctacttcttttactctcccatgatacaagtaaccattacggtcgaaaacaacagtagttatacctgcttcctgagcctttttagcaatcatttcaccaactttagcagcttgttctttctttgcgactttctcagccatacctaaagaagaagcagcagccagtgtcttaccagaaagatcatcgataatctggacataaatttgcttgttacttctaaatacactcatacgcggacgttcagcagtacctgaaatcttattgcgtactctatatttgatcttaactcgtctttctatttttgttgtcataataatctaattttatatgatttacttagcgccggctgatttaccagactttctacgaattacttcgccaacaaacttaatacctttacccttatatggttcaggtttacggaaagaacgtattttagagcaaacttgaccaagcaattgtttgtcacacgattccaatataataagaggattcttatttctttcagacttagtttcaactttcacctcagcaggcaattgaatgaaaatattgtgtgtataacctaaagccagttcaatgatgttaccttggttagaagcacggtaacctacaccgacaagttccagttcctttttatatccttcagacacgcccacaaccatgttatgaactaaagaacgatacaaaccgtggaaagcatgcttttgcttcgggttatcaatcatttctttttcgttttctgttaaagtcacgtgtccgtcttcaatggcaacattgatagcaggattcacatattggctaagttcgcctttgggtcccttaacggtaaccacatcatccttcagagtgactgtcactccagcagggatactaatgggtaattttcctattcttgacattgcttattcctcctaaattaatatacgtaacacaagacttcaccaccgattttcagttcagcagcttctttgttagtcattacacctttggaagtagatattatagcaatacccagcccattaataacacgcggcatatctttgtaaccagtatacttacgcatacccggagaagatactctttctaattttttgattgcgttaactttgttaacagaatcatacttcaaggcaaccttgatagttccttgaggaccatcttctacaaacttatagttaagaatgtagcctttttcaaaaagaatcttagtgatttcttttttcaagttcgaagcgggaacttctacaactctgtgcttagcaccaattgcgttccgcaacctcgtcaaataatctgctattggatcagtcatataaaaataaattaaattaatcaggacttccctgacaatatttaaacaataattaccagcttgctttctttacgcccgggatcagaccgttagatgccatctcacggaactggattcttgaaattccgaactgacggatataaccttttggacgaccagtcagtttgcaacggttgtgcatacgaatcggatttgaattcttaggcaactcttgcaatttctgtgcagcttcaaaagcatcggcaggttcacctgttctcacgatttgcttcaaagcagctcttttctcggcgtatctggctactaatttagcacgctttacttcacgtgccttcattgattcctttgccatattctattaatcttttttagcgtttttaaaaggtaaaccgaattccttcaacaaggcataaccttcttcatctgtctccgcagaagttacaaaggtaatattcattccgagaattcttgtaatactatcgatatttatttcagggaaaatgatttgttcctgaataccaagggtatagttacctttaccatcaaacttactttcgatacctttgaagtcacgaatacgaggaagagctacacgaactagtttttccaagaattcatacattctctcacggcgcaaagttaccataacgccaatcggcatttttttacgtaacttaaagtttgcgatatctttacgagaaatggtagctacggccttctgacctgtgatagctgtcatttcattgattgctacttcaataatcttcttatcagcaacagccatacctaaaccttgattgataacaatcttcttaagtacgggtacctgcatcgttgaagaatactggaattgtgatttcaatgcaggtgcaatacgatctgcatattctttctttaggctagcagtattactcattactaaatctcctctcctgattttttagaataacgcactaaagttccttcagaactctttcttctcccaatacgcgttgctttaccagtttttggatcaaccgggttcaagtttgaaatgtggatagaagcttcttgcttcacaataccaccctgtggattctttgcattcggcttagtgctcttagataccatattgataccctcaacaattgcacgaccttctttaacaagaaccttcaatacacgaccagttttgcccttatcttcgccagcatttacgtaaactgtatcgccttttttaatatgtaatttactcattactcaaatcttttacaaaattaaagtacctcaggcgcaagtgacacaaccttcatgtttgtagcacgaagttctcttgctacaggaccgaaaatacgacttcctctaatttcacctgcattattaagcaacacgcaagcattatcatcaaaacgtatataagaaccatcaggacgacggatttctttcttcgtacgtacaatcaaagcctttgatactgcaccttttttaacatcactcgaagggataacactctttacggaaactacaataacatctcctactgaagcgtaacgacgacctgtgccacccaatacacggatgcacaaagcttctttagctccactgttatcacatactgtaagtctggattctacttgtatcataattacttagctctttcaattatttctactaatctccatcttttagtcttgctcaaaggacgagtttccatgatgcgtacagtatcaccgatattgcattcattcttttcatcatgagcatggtacttcttcgttttactaacgaacttaccatatatagggtgt

SEQ ID NO: 4673 - DNA, 4616 bp, Unknown
  gut microbiota DNA sequence
tttcactaatctcgaagaagccaagcaattcggacgtgaaaatgggcagatcgctattttcgacattgggcaaatgagactcatcaaattgtgatccggaggggcgaaagcccctccattacaaagtatattgcattattaaatacccgattatcaaaacgtaaattgatgaattatgaagaatcttgaattactacctctccctgctgagagtaaaaagcggatcgacgagttcgcaaggcagtatcagcgcatggggcacatctctattgaggttgtatcctataatgaaggtcgcttaattgttcgcgctgaacaaaaagacctggtaaatgacaagttcctctccaaaaaggaactgacggaacgtatccgtgacatgtttaagggagagatcccggacgactggaagctcactgtgtcagctgtgaacttcgatcgcaaagatatcgacggaatcaacattgactggatcaaaagacggatggaacgcttaggattaaaaagcaaacatctgagcaactatacaggcattgacaaatgtaccgtatcctcactcctgtccggagacaaggaactgaccaaatggcacaaggtagcgctatattacttctttaaatattacgaagtagccaacttctaattttcatttaataagcggagcaaaaaactccgcttactttttgccgaatctgaaaaagattgtactttagcacctgcccaatatcgttattaaaacatgaatcccttactatagtgtaatcagacagctgattccggctaataacaccggtgggcgcactatagtgagggattcgccatattactatgatatataccaacttcaatgtagatttgtcttcagaagacaattcaagtgatccttactatggtagtggaagtagttcagatgaatccgcaccattaccggatattacgagtgacactccgatagaaaccaatggtttggatataagcgactttgtcaataaatagcaaatgctattaaaaaagaaacgacagccataaaagagccgaatatcagaaatgcaagagagcgtttagtatgtttgactctttttttattcatttcttcctgcttcgttattttcttttgaagttcaaccaattcatcgctgacaacctgcttcttttgatcagtatctttatctttccctttaaaataagctatatattgcggtatagtgaatttatcaggttctttcccaggcgcgaaaacagtatgtggcttgatgacgtgataaatgtaaccgatggaaataaatgtaaaaacaacaatagacaaacatccggaagtcaaagctgcatcatcacttacactcaaatgcgtgagaatatatcctattgcagctgttaaaatgccaaaatagatagcaaacaaagtatatcctctttcagttataagagattctacacggacaagatcattatggcgaaccatagcctgttcataataccattctataagcgataaatcgattacttttaattgttctgcagtgagtctttccatgatctatatattttttgagctaaaatacatttttcttttggagcaacaaagaaacttttgtactttagccgttgccaaataattaatgaataaacatgaatcccttttcattgtgtaatccgtaaaatcggattaaggtctttatataaccttttggcgcgcgatgataagggatccgcccgttcaatatggaacttaaagattttatcaaatcgacaattactcaaataaaagaatcggtagaagagttgaatgaagagtttgaagaaggaaaagccatagtcaatcctttatctgcaaaatctctcaatcgtagtatgattggacgaactggtgctaacgttacagatatagattttgacctaagtctatctgtcacggagacagatggcaaagaaggtaaaataggcatcatgtcaagtattatagggatgggagcttcttctaaaagtgataatcagaatatatccaccaatcgaatacagttcaccattcctgtaatgcttccctacaagaagccttgcgattgactttatctgtggctatatactcataatagcgcaatgcatatagatagatgtatatcactacatgccttagagccttctattgtctctaaggcatatttcaggcagcgtttgcgtaatttccgctcccttttacttttgaagtatctaagaatacagttcatggtacaatattttgagctaaaatacaacattattttagtacattcaattttattcctcttatctttgcacttgtaacaaattaaaaacacgtactatgaattgtaaacttggaaaattagaaatcccggctgatcaaccttttctaaattgtaaattaggtcgagaaaagtacgcagaagtacttaaagctattatcactacatacaaaaaaggatttgtcttagctatagacggtaaatggggaacaggtaaaactacatttgtagaaatgtggaaggcatatcttgaactggacaaattccacacattatactttaacgcttgggaaaatgacttcatttcagatcctcttgtaggtttaattggcgaacttacaaaaataaactcttctaaaagaacaaaggatttagcatcatccatgataaatacggcgggaagaattgtgctaaaggcagttcctgcaatgttcaagggagtaattaagaaacatgcaggtgaagaagtagttgaggttctttacgattgtatcggagaaggatcttccatgttgaaaaaagaaatagacaattatgaaaggcaaaaagaaagtctactaaaatttcgggaagatctcgaaatatttgtaaatgaagtttgcgaaaaaaaaccattgatatttatcatagacgagcttgatcggtgtaacccacattatgccgtaaaggtactagaacgaataaaacatcttttcaacatacctaatattatatttgtcttatccatagataaggaacaattaagtaactccatacgtggatattacgggagtgacctaataaatgccaatgaatatcttaaaagatttattgatattgaatatgctttacctgatcccgatgtagaaaagttctgtagctatttatatgattactatggcttcgaagcatatgaaaaggcaagaggcactaaagagatggaagaatccattttgactatagccaatactctttttatgcataagaatctatcactaagacaaatagaaaaaatatttgctcatattcgtttatctttgaatatgtataaacataaccaagtcatatatgctgaattaatatgtctattaacataccttcgaatttgcgaatccgattgttatgttaaaataacccacgaaagttatactatacaagaacttacagatcaattagagagtataattccaaaacaaatattacagattaaaaaaaaatacgaatcttctcctagtcgacaatttcactttaccatagccttgctattaagatgttatactttcaaatatgaaaattccgatgagaacgataaactcttaactagagatccttctcaaccaaatctagtaatcaattttaatgtaaagacgatcaacaaagaacttttgtcttcagctttagaatggacatctcaacgtaatatagcagtacctttacattattttactcaaagaattaatctactggaaaattttgcgatctataatatagaataatcacgttcttaattaatataattttctcagtctatattaaatctacaaacaaaagcagagcaaaaaactctacttttgtttgtagattcccaaaaagaatgtactttagcaactgccaaaacaaactaactcgcgaattccttatgtcgtgcacccgtaaaatcgggtggctgggtggttccagttggcacacgacataaggaattcgtttttatatatttatggaaccattagaaacccattttaaaggtattatattaagtaacctgtatcgtgatcctcgcaaaaaacgcatccaacatgacatcatggatgaactacaaactaaattatttcctgagcaacttattagctaccggaaacaattagtcatggaaggattaatcactgaagaagaaccggacgaagtacattcattagttgaaatcaccccgaaaggatatgaagccatccaaacttttggaagctatcaagcatatattgcagaccaacaaaaagctataaagttacagcgcgaaagtgaagtcatgaaatccagatatttaaggctaaagacgatcagcattgtaataacaacactattaagtattttatcttttataacaggaatcctactatcagacctagtaaaaggaataataaaataaagattactttataataaagagacacacgaaacttataatagtcatatgaaagatctaatagtttacgcttaagattatttatttcttgctcctgatccatatctaactctatttttgagctaaaatacaacattattttagtacattcaattttattacccttatctttgtcccctgtaacaaattaaaaccacacaaatgaaaaaactttttttattatcaatgatgctttt

SEQ ID NO: 4674 - DNA, 2231 bp, Unknown
  gut microbiota DNA sequence
aaatataattcttttctttccaattcttgcaaattcttcaaacatttgcaagaattggaaagaaaagaatgtgatattgagaaatactgcccgaaaagtatatcattagtaaatttattgctgcttttttatccattcagtcatgtctttcaggacttccggatttattgtctcttccaattgtccgtattcggctaaagttcctttctcacaagtctgaaacaggtggttcagttttggatagactttgattgtcacattcttgtttccgttctcgctgatgtgctgcttgatagcagtcagattcatatcggcatctacctgaatgtctttttctccgtttaatgcgaggaccgggcactttatttttttcagacttgcagtcggatcgtatctcataaagtggagataccacggtgaagtcatgaagtttatttgggcagatagttgttgtacggtattcaggtctttcaactgttcggcagacatggttctggtaacatcagcgtaaacttcttttctgatttcatccgacgacttgtccgtttgctgtaataaagagtatctgtggcgaacggatggtttcattgtctgccacaccggatcgggcatcccttgggacttggaaatcaattcaacttgtttaagcatcaagctgtcacctcgcacggcagctcctgccaatgatatgataaatgagatgttggggtctttggcggcaatatcaaatgcgattgttccaccgcagctatgtccgataatgccgattttccgggtattaatttcttttctgctgcgtagatagttcagcgctgcttccgtatcttttgcgaaatcttcgttggtagcacttgcataatctccttgcgaagcggctgtgccacgatcatcgcatcttagtacggcaattccgttacgtgtcagataatcggagataacaagaaatggtttatgacccatgatttcttcatctctgttttgagcaccacttcccgtaaccaatactacagccggaaatttactccctttctccggaagggttaatgtgcctgccagagtgattccgtcctgcgtattctttacgttgacttcttcgaccttataaggaaaaggcggctgaggctcctgcgggcgtttaggcccgctaaactctcctttcgtcagattcaatgggaggggcattccttgtgtgaatgtgccggtaatggtttggtcggcattcagctttcctttataagaggcatggataatcggtatctgaacagtcagtgtagagtcttgaaaagaagttgtttccgtttttatatctttggttccctgatcggggctgtcaagagttgtcatataagtcccctgttccgtatgtttgatatggaatacaatggttaacgaaccggcaggaagggagagtttaccatgccatgtgcccgaaatgtcttgtgcggaaagatgtgaaggaactgtcagttcgattaaaaagccgatgaaagcgatgagcatgaaacaacgttttgaagttttcataggaatgaaatttgggtttataaatggcatttgcagatcagagatgtagcattaaatgcctttctttgatgacaaagatatgcttttatattagataacttctttttttgtggatatattcagtggcatgaaccgccattttcataaaggagccattttccggatattcgcaataatattccgtagaaataatgtcggtttctgaaagacttttatctttgcagatataatacatatggcgctatgagaaagattattttgattttcgtgacaattgttcttccctgtttgctttgcgcaagaaatgatgataagagtacagatatgctgcttcgtgagattgacggaattatcaggaaccgtcagacttacggtgcagaaaaagaagcacgtatctccgatttgaagaagttgctgtccgaggctacctccgatgagcagcgttatggattttgcggcaggcttttcgacgaatatcgggcttataatctggactcttcgtatgtatatgcacagcggaagcaggaactggcttctcatttgaacaaacaggattatctggatgatgccgccatgaatatggcagaggtgatgggaaccaccggaatgtacaaggaagctttggagcagttgggacagatagacaagaaaaccctgtctgattatctctatccctattattaccacttgtatcgtactatttacgg

SEQ ID NO: 4675 - DNA, 668 bp, Unknown
  gut microbiota DNA sequence
atatttatggggtataatgataatttcattcccgacggaatgaatgcttttgagcgcaatgtcaagcgaattggggattgcattattgcgggcatattactgattattttttctcctttatttttaatctgttatatagctgtgaaacgtgaagatggtggtccggctattttcaaacaggaacgtatcggtcgtttcggccgtccgttttatatttataagttccgcagtatgcgtttggatgcggaaaaaatgggccctgcgttatataagggtgggaaagataaacgattgactaaagtgggtaagtttttgcgtgaacatcatttggatgaattgccgcaactttggaatgtcttctgcgggcagatggcttttattggtcctcgtcccgaacggaaatatttcattgatcagataatggaacacgatcctcgttacgtatttttgtatcagatacgaccgggtgttacttcgtatgctacgttatataatgggtacacagatacgatggataaaatgttgcgtcgtcttcgctatgatttgttttatttgcagcatcgctcatggtggtttgattttaagatcttggtgaagacatttataaatatttgttttggcaagaaattctagcagggaaaattgcaatgtatttgtaaaaatcaaaa

SEQ ID NO: 4676 - DNA, 9001 bp, Unknown
  gut microbiota DNA sequence
agcaaacctatcctgctgattgtagaagacaatgaagatatacagaaatacatcgccgaatctttctccgactctttcgaagtaatcacaggcagcaacggtgaggaagggaaacagcaggctctcaaccgtattcccgatattatagtaagcgatatcatgatgccggtaatggatggcatcacgctatgccgtcaactaaaagaggatgtgcgtaccagccacatccctgtcatcctgctaacggccaaagattcattgcaggataaagaagaaggatacgaagtgggagcggattcttatctgaccaagcctttcagtgcttcactgctgcgaagccgcatcaacaatctgcttgattcgagaaagaaactgattgctcaattccagcaggccggaacgaatcataaccccaattctcatttggatgaaaagcgttccataatcaccgaggcgctcagcaaactggataacgaattcattgagaaaatcacgcaactggttgaggataacctttcttcggaaaagatcgatatcacttacctgtccgacaagatgtgtatgagcggctctacgctctaccggaagatgaaagcgctgaccggactttctacgaacgaatacatccggaaagtaaaaatgcagaatgcggaacggttactcctcgaaggaaaatataatatctcggaaatagcctataaaataggaatgaacagtacaggctacttccgtcaatgttttaaggatgagtttggtgtctctccttcagattatctgaagcagttcacctccccaactcctccaccatcgtcttaaacaacgatctgctgtcattcagcggcatatccgtagccaagtcccagctcatcattcctttgagctgctggtccatcgcataacgtgtcttggcacggatattattttgcccgtcaaagacatacacgtctcccttataggttacttcgttttgtgccggccccgtaatcagcccgtcctgcacaaaactgaagtaagcctcagtcttctttgagccatcttttgtcacgccatagaaaggaacgcctgccaccagcttttcctttggaatgccataagccaacgccatctgtatatccgaacagtatttctccatcgggaagcgaaccggcgaaggaccgtaacactgataagaaatgaaatcgaccgcagcaatcgcctctttactaatcttataacacacaggatgcagggatacgctgaacacatatttatctcccaatacctctctcatcttcagaatagccagactgtaatcttcatactctttttcagtctccgcccattcaaaatccagatcgatgccatcgagcttattcttttccagtatcttctttatgtttttggcaaatgcaacacgggccgcctcatctgcaaccatcgctttccactcgccactggcagcgcccagacgaagttttgtctttgttcctttcacatccgcacggacagactttatcaattcctcccaactagtcactcctttcccattctcaaagatacggggattctcaaacgaaagcgacccgtctttattgggacggacgttcagaaaaatcagatcatcactcgcccttaaactctcggcagaaatacgtccgcgattgtagaaattaccccgtacatacgaactaatgaagcagttttgttgcgcatacaacgataatccgacaaacaagagaaggaaaaatacaatttttcttggtagtagcataataattgataattaatgggttttgatcgcaaaagtaggtacaggcaaagaaaacaaatgttcaaaaatcactataatacttccaaaaatcaacataaagtttcttattgagagatgtaaaacaaaaacatccttttaaaaagggaattaagtgttttaccggaatcaattacattaaatcgcaaaagttttccggattataatacaaagtgaataacaatcactatctttaggcataaaatcagttcatatgatcatttatctacatgaaagcaaccgtctaacttagactgacttttgaagaaatgcaacatctatacgtatatgaataaactcgtacttaccggtctgctggcagccggaaccatgacgcacctgcaaggcgctcaacctgccggacaacgccccaacatcctttttatcctgagtgacgaccacacctcccaagcctggggcatctatggcggagtactggcagaatatgcccacaacgccaacatccgccggctggcaaaagaaggggtagtgctcgacaactgtttctgcaccaactctatctcagcacccagccgtgccagtatcctcaccggtctatacagtcaccggaacagactgtacacccttgcggactcactggacacctccatccccacccttgccaccctgctacaagccaacggataccacaccggactcgtcggcaaatggcatatccagtcgcaaccgcaaggattcgactactactccatcttctacgatcaaggcgaataccgtgacccgactttcatagagagcaccgacccgtggcccggcaaccaccagttcggcgaacgggtgctcggcttctccaccgacctcgtcaccgagaaagccatccgatggatgaaagagcaggacggcaaccaacccttcctgatgtgctgccatttcaaagcaacgcacgaaccctacgactacccgatacgcatggagcatctctacgacggcgtcaccttccccgaacccgaaaacctgctggactggggaccggaaaccaacggccgttctttcaaaggacagacactggaagagctggaacgccgctggcgcatcgcatcacaggaccccgacaagtggtggtgtcgctaccccggactgccgttcagcaccgaagggatgcaacggacggccgccagacgtgcttcctaccaaaagtttatccgtgactacctccgttgcggcgctaccgtcgacgacaacatcggcaaactcctaaacgctctggacgaaatgaatatcgccgacaataccatcgtcatctacgtctccgaccaaggctatttcctaggcgaacacggcttcttcgacaaacggatgttttatgaagaatcggctcgtatgcctttcgttatccgttatccgaagaaggtacccgcaggaaaacgtctggacgatctgatactgaatgtcgatttcgcaccgacgctggcagaatttgccggagtaaagatggagaatgtgcaaggagacagcttcgtcagcaacctggaaggcaacacgccgaccgactggcgaaaagaaatctactatcgctactggaccaatcatactattcgtcccgcgcacttcgccatccggtcagaccgttacaagctgatcttctattatgcccgaaatctggacatgactgatacggagaacttcgactttactccgtcatgggacttctatgacttgcagaacgatccgcacgagaatcataatgcatacaacgatccgaaatatgcacctgtcatcaaacagatgaagaaggacttattgagacttcgcaaagaaaccggagatacggacgggaaatatccggaaatgcaggaactgcttgaaaaatactataataagtaagtgactggtacggaaactgaactgtcgcatttataacttgaacttaggcagctgctacaagtgaaaaagatagcagttttgccctaacgctctcattattcgcgtgtatccctttattcatcggcatttcaagcattacagcaagtatggtggcagagtgagagcaaaggtttgctctcactctgccaccacggcatataggtcgtttatcctacattatactttgatttactgggtattaacatctgacgcgtcagctattaacgattgtcatgtcagctattaataattgagaaatcaggtattaacagctgagaagtcatccattattgactgaaaaatgaaataatacctttcgaacggacaggtcaatcagagcaacttatgcggtcaagtgagttgaatcgagctgtcatatgaacgaaatcgacagttgttccaagaagtttcattacttgaaacagtttgtttcatgccttgaaacacttggtttcaacaggtggaactaatgatgaaactacttgttctgaatatatcatgtaaagggatgaagaaaatgctgcagatggcagataaaaatgtattaatgtattaaagaacgccattcaggagtccgtgaaacttcaaagttgtgcaaacaaaaccaataaagacaatcatatccccgtttctgctaaaacataatggaagaaagaattttattttcacaaaaaacgactatctttgtccctgtagacaacgattcacggataaaacccatgtcaaaagactcactttgtgctcaacatacagattgctcaggatgccccaaagcgatggaaagtactcttattcacagaaatctgctcagagggcagcatattccgaaggataagtgcacgcaaaactgcatgctctttatgatcgagggcgaattgctgatcaacagtgacgaacatcccggaacgacactacacgagaaacagtttatcctgcaagccatcggctcaaaatacgagatactggcactgacggacgtatcatacatccttttctggttcaacgaactgccgttgctatgcgaaaaccgctaccgtgaaatcatcgaccaggcagaaggcccgctgacctacaccccaatggtgatgaacccgcgcctgttctatctcatcaacgacgtagccgcataccttgacgaatcgacacccgcctgcggcaaatatatcgacctgaaatgtcaggagatggtgtatatgatcaccaattactatcccctgccccagttgagggctttcttctacccgatcagcacctatacggaaagtttccaatactttgtcatgcagaattacagcaaagcgaagaacgtcgaagaattcgcacatctgggaggctataacaccaccaccttccgccgtctcttccgaaacttatacggcgtgcccgtctacgaatggatgctggagaaaaaacgggaaggcatcctcgaagacctacagcactctaatatgcggattacagagatttgcaaccggtatggtttcgactcgctgtcccaccttgcacacttctgcaaagactccttcggagacaccccgcgcgccttgcgcaagaaagcggccaatggcgaaaaaatcggaaagatcaccgattaaggaattatttctttaattctttggtcaatcaatctatttcccctatttttgcagtctgtaagaggtgtaaaacgtcgaaattttagttctaacaattaaataatttaaattcaatcatttatgtggttaagtaattcatctgtaggaaggaaagtggtgatgagcgttaccggtatcgcccttgtcctgtttctaacatttcacatggcgatgaacttagttgcaatcatctcggctgatggttacaacatgatttgtgagtttttgggagcaaactggtatgcgctggtagctaccgcagcactggctgctcttttcattattcacatcatctacgcgttctggctgacaatgcagaatcgcacagcgcgcggtagcgaacgctatgcagtggtcgacaaaccgaaaactgtagagtgggcttctcaaaacatgttggtgttaggcattatcgttatcgtaggcctcggtttgcacctcttcaacttctgggcaaaaatgcagttgccggaactgatgcacaacctggacatgcacgctgatacactgacgctggcttatgcggcaaacggtgcatatcacatccagcagacattctcttgtccggtttatgtagtgctctacctcatttggctgtttgctttgtggttccacctgactcacggtttctggagctccatgcaatcactgggatggaacaacaaggtatggatcaatcgttggaaatgtatttctaacatctattctacgattgtagtactcggtttcgcactcgtagtagtggtattcttcgtgaaatcactcctttgtggcggtgcttgctaaatagtaaattgtaaatgattaaattgtaaataatattatgatcaagatagattcaaaaattccagaaggcccggtggctgagaaatggaccaactataaagctcaccagaaattggtgaaccccgctaataaacgccgtttggatatcatcgttgtgggtacgggtctggcaggtgcttctgctgctgcatccctcggtgaaatgggtttcagagtattcaacttctgtattcaggactctccgcgccgtgcacactctatcgctgcacagggtggtatcaatgctgcaaagaattatcagaatgatggtgactccgtttaccgtctgttttacgatacagtaaaaggtggtgactatcgtgcacgtgaagccaacgtttaccgtctggccgaagtatccaacgctatcatcgaccaatgcgtagcccagggtgttccttttgcacgcgaatacggcggtacactggacaaccgttctttcggtggtgcacaggtatcacgtacgttctacgctaaaggccagaccggtcagcagctgttgctgggtgcttactccgcactaagccgtcaggtaaacgtaggtacggtgaagctgttcacccgttatgaaatgcaggacgttgtaatcatcgacggacgtgctcgcggtatcattgccaagaacttaatcaccggcgaactggaacgtttcgctgctcacgccgtagtaatcgctaccggtggttacggtaacgcttacttcctgtctaccaacgctatgggttgtaactgtacagctgctatctcttgctaccgcaagggtgctgtattcgctaaccccgcatacgttcagattcacccgacttgtatcccggtacacggtgacaagcagtccaaactgactctgatgtccgaatctctgcgtaacgacggtcgtatctgggttccgaagaagaaagaagacgctatcaaattgcagaaaggcgaaatcaagggaagcgatattcctgaagaagaccgcgactactacctggaacgccgttatccggcattcggtaacctggttccgcgtgacgttgccagccgtgcagctaaagaacgttgcgacgcaggtttcggtgtgaacaacacaggtctggccgtattcctcgatttctctgaagctatcaaccgcctgggcatcgatgtagtgcttcagcgttatggtaacctcttcgatatgtatgaagaaatcactgacgttaatccgggcgaactggcaaaagaaatcagtggtgtgaaatattataatccgatgatgatttatccggctatccactacacaatgggtggtatctgggtagactacgaactgcagactaccatcaagggtctgttcgctatcggtgaatgtaacttctccgaccacggtgcaaaccgcctcggtgcttccgcattgatgcaaggtctggccgacggttacttcgtattgccttacactatccagaactatctggcagatcagattactgttcctcgtttctctaccgaccttccggaatttgccgaagcagaaaaggcagttcaggctaagatcgacaagttcatgagcatccagggtaaagaatcagttgattctatccacaagaaactgggtcacatcatgtgggaatacgtaggtatgggacgtacggcagaaggcctgaagaaaggtatcgccgaactgaaagcagtccgcaaggaattcgaaaccaatctgtttatccccggttctaaggaaggtatgaacgttgagctcgacaaggctatccgtctgtatgacttcatcactatgggcgagctcgttgcttacgacgcattgaaccgtaacgaaagttgtggtggtcacttccgtgaagaataccagactgaagaaggagaagcaaaacgtgatgacgaaaacttcttctacgtagcttgctgggaatatcagggtgacgatgaaaaggctcctgtattgatcaaagaaccgctggtatacgaagctatcaaggttcagacccgtaactacaagagctaatcggtgaagttaaacatttaaaagaattagacgaaaatggataaaaatatatcatttacactgaaggtatggcgtcaagcaggcccgaaggctaaaggcgcttttgaaacctaccaaatgaaagatatccccggtgatacttccttcctcgaaatgctggatattctgaacgaacagctgatcagcgaaagaaaagaaccggttgtattcgaccacgactgccgcgaaggtatctgcggtatgtgttctctttacatcaacggacatccgcacggtcctgcaacaggtgctactacttgccagatttacatgcgtcgtttcaacgatggtgacaccatcactgttgagccttggcgttcggccggtttccctgtcatcaaggacttgatggtagaccgtactgcttatgacaagatcatgcaggccggtggttatgtaagcgttcgtacaggcgctccgcaggatgccaacgctatcctgatcccgaagcccattgctgacgaagctatggatgccgcttcttgtatcggttgcggtgcttgtgtagctgcttgtaagaatggttctgccatgttgttcgtttcggcaaaggtcagccagttgaacttgcttccgcaaggtaaaccggaagctctgcgccgtgcgaaagctatgttgtccaagatggacgaactcggattcggtaactgtaccaacacccgcgcttgcgaggctgaatgtccgaagaacatctctatcagcaacatcgcccgcctgaaccgcgacttcatcatcgctaaactgaaagactaagcgtgagcttgatttgattaatagcataaatcccccgtcggcgttagctggcgggggatttctttttactgaccaattatttatagatagcttgttcattat

SEQ ID NO: 4677 - DNA, 2582 bp, Unknown
  gut microbiota DNA sequence
acgagtaataataaatagaataataacaaagtaagataggatggataaagatacaaagatgagtttgattaaaggtttgctggcaggacagctgactaaaaagcagcgaaggagctatgctgacctggaatcagtggatagagaacttaaaatacaatggaatgaatcagaaaataaagctatagattttaaaataaaagaacagatctgggaaaaagtaaaagcaagatgtgtagataggaaaagaaacaaagttctaacagaactaagatggcattttgccgtagcttcacttgctcttttactaacaataggaggattttggatgaattcaatcagagataatattaacgacgaatttataaaggtgatagcacaacaaaaccaaatgcacgttttaccggatagtacaaaagtatggatggaatcaggtagttccattaaatacacaaaagccttcaacaaaaaaagagaagtatggttagaaggcaactcattttttgaggtatataaacatgaaggcagtttcttccaagtacatattaataaagcttttatagaagtaaagggaacctgtttccaaatcaagcaaactaatgctgaaaaaaatgaaatcacgctgtttcatggtaaaattgaattcaatgtagaatctacaggagagaaaattatcatgtctccatcgcaaaaggtaatgtataatccaaacaatgcacaaacattagttgagaatgttatggatatcaattggaaggacggaagatacaacttcaaagaaaccccattatcccagctcatttcaattgtaaatcaaatataccaatcaaatataattctagaaggaaagtttactaaacagccttcattcacaggtagcatccgttatgatgaaacattggatgacgtaatagagaagctttgtttcagccttaacctcacatacaaaaaacagaatagtaaaatagtaatatataattaaccatatttctaataattaacccaatatttaacctcacaacaagttaaatcatgaaaaaaaatcacagttgttaccggaggcgatatctgaagcatatcgcactcgttttgctcttttaccccttgtccgctcttggagctcagggacacatatctatcaaggggcaatcaatcactattatgcaagctatccagcttatagaaaaaaacagcgactacacgtttttctacaatgcagcagatctcgaagacaaacaacggaaagacattaattgtaatggtcctattgacgagattctggatgaagttttcaaagacagcggtattagctatatcgtaaaaaacaaagaggttattctcaacgtacaaaaaacgaataacacccaacaaaagaaaaaacgtactgtaaccggtactatcatagacgcagtggacgatagccccatcattggagctaacatcacgattaaaggtgacaagaacactggtacaatctcggatattgatggtaattttagtctttccatacccgacaataagacgatccttgtcgtaacttacatcggatataaaactcgtgaagttcctgtagaagatctagggaatatcaaaattgtactggaaggagacgatcataccttgaatgaagttgtcgtagtcggttccggtacccaaaagaaggtcagcgtaacaggagctatcacaagtataaaaggtgccagcctcaaactgccgtcatctaccctgtccaactcatttgccggaaagttggcgggtgtcatcgcaaaaacaaactccggagagcctggctccggtgccgaattttacattcgcggtatcggtacttttggtggacgagcaactcctctgattttattggatgatgtagaaatatcatccggtgaccttaattatgtgccagccgagaatattgaaagcttctctatccttaaagatgcatctgccaccgctatctatggttcacgcggagctaacggtgtaatgatcgtcacaactaaaggcggagaatacaatagtaaaacatccatcaacgttacagcggaaaactctttcaactacttagacaagttcccggaatttgtggacggagctacttacatggatatgtataataaagcttcattagccagaaactcttccgctacacccaaatacagtgctacagacatggaacgcacggcatccggagtcaacccatacctataccccgatgtaaactggcaagacgtattgttcaaaaacatgagtatgcgccaacgtgccaacgtcaacatttccggtggtggttctaaagttaaatattacatgagtttggatgtcagccatgattcaggcttgctgaacacagggaaagcatattcatggaacaacaatattaatataatgaactataccttccagaataatattgcttataaactgacgccgacgacaacaatcaaaatgaatatgaacgctcagatccgtcagaaaaaaagcccgaatgtatcaagcgaggatttgttcaaacagattctgactactacccccatagaatttccggttacttatccaagtcaggacgggcgtatcatgtacggcaa

SEQ ID NO: 4678 - DNA, 2224 bp, Unknown
  gut microbiota DNA sequence
atgccacattttgtattgagccccgtagtactattgaaaattcaaaccaaggaatattataccgtcggtctgtatattccaatgatgctttctccagtgcttctggccaaaatattcccattcgagttatgatttcggaaataaactcccgatttgactgttccaattgacgcgtaccacattcatcgataatcataacttcacctttaggagtgaaataaaattccattccagtcataatcattcctcctttctttcaggaaataaggttgcgacatctgattgtaagatctcagccacaatctttttttcaaccatactgttaggttgggtatatccatacatccagcaacgaactgtatgacgattacgttgtgtcgcttctacaatagctgtaataacatcttctttaggagctgatatgataactggacgacgttctgcctttggtaaggctgcaaaatactctgcgaggggtaattttttgagatttgggacaatattattgtccgaaccattttttttgctcatatttgtaatgttttaaagattacgttttaaaatgtttaatcgaaagacacggagctctgaatcaagtttctcaggccggatgcagggcttccgtttctttactaaatgaaactgttatgaaaaattttatcaaggtgattgatgcctatgatattgaaaaggttatcaacattgattttatccaatctttatataaagatgaagattacactattatccgattcagcaaagatgattgtatttacgtcaaagactcttatgaagaactaagtcgtaagcttcttaaattgccatctgaaacaaaaccgtctacacgtaagacaggacgaggttaagaatcatcctttttcttgtacttctccggaaagatggcttctttctcttcatctgataagtaagtaatatactctttgatgaatagatagattctctcggctgaagctgctactgcgttagatgaagcgtaataggtttcagtatagtgatcgtaagaatcaaaggttttactaatagttgcttgttgcacacaccatttacgtagtttagtatcctagtgattgtgaattagacgaataataggtctccgaaatgtaattcctaatattataatgtattaatgaacaaataatatgtagttccttataatataaaaggatattatagaatgacaagaacgcctcaataaactaaaacaaaacaacttataaaactatagtattatgaaaaacattttattcacactttttgctattctcatcttaactagctgcagcaaagatgaagaagattggactgaacttaacagcaataacattataggttattggtcgacaggaatcgaaggtactcacaaattattaagtttcgatgaggatggtactggctcttttggaatttacagcaatgctactccaatttcctttcaaatgttcgattataaaatcgaggaaggtagaatctatatttatgatgtatatccagatgaaaagactccatattatttagattgtaagatatcaggcacgactcttaaagtcgaaaccggaagtgaagctggaacctataagaagcaaaaataaaagaatttaggagcccaattaattgattatataacacaaaaaacaatatgatgaaaaagtttttttatttaactgcaatactaaccatagttttggtttcatgtaattcagaaaagaagtataaagaaaaactctctaatgctgcttccatgattgagaaagaagctaatttaagtgaagctatagttcttacctattgtgatacttggagaaaagtaatttatgatcatgaatacaatggggagtattgcaccgatttcaatgaagccttagctaagcttaatgagttcataatcacaacagatacgtataaaaggttaaaacaaaagagagattcaatcgggactataatgccactactaaatgattatccttcaaattgcaaggatgcttataatgagttagtatcaatatatgcggatgcagatgaattattcagatttgcagatgatcctagagggtctttatctacatactcaacaaaaacgacagacctttttcaaaagatagaaaagtccatgaaagaatttaaagttaagcatatacaaaacaaataaataaggagtctagttaattgattgtgctactaaatacgaaatacagaaatctaaaat

SEQ ID NO: 4679 - DNA, 8799 bp, Unknown
  gut microbiota DNA sequence
ctctagtttcctgctttccaaataaggtttagccatctttcggcaatattcccatagttcattaccgaactcttgttttagtttttctataggtgtaccccatatggtgcgtatggtggtaatgataaattcgttgtaacgggtcgtttggtccaggttttctgtctcaaagtcacgctggtttctttctataccttttatatataggtcgatggaagatacgttccattcgcgtgtcgctccattgaatgaatgtgcggacggtccgcagcccaaatatggtattcccctccagtacgaagtattgtgacgggagtatttgccggggcggcagaaattggatatttcataatgctcgtatcctgcattctgcaaatgttcgatcagcaatgtaaagaactgcagactggaatcttcgtctacttcctctatctgatgctgcttcaacatattatatataggtgtatcttcttcgtaagtcaaatggtaagcagaaatatgctctacatccaggcggatagcttgccggaggtcgttttcccaccgtccctttgtttcgcccggcagtccgtaaatcagatcaatgctgatattctgaaatcccgcttctctgcacctgcgaacagcttcgatggctgtttgggaattatggcgacgtttcagtaatcgtagtgtcgtatcatcaaaagtctgtatccccatgctgatacggttgaaagggagcgaggataacatctttagatattcctgtgacagatcgtccggattggcttccagagtaatctcccggcagtgttccattccgtaattttcccgtatagtttcaaagatgcgtttaaaatcagcttcctccagttgagagggagttcctcctccgaaataaatggtttctataggttcgcctttcagatattctttccgcattcccagttcatggcagagggcgtgcacataacgcgtctttaattcgctgcgggtagtcgaataaaaatcgcaatagatgcaacgtgtcttacaaaaggggatatgaagataaatacctgccatagtagatgtttagtttgttaccaattgattatagcctgcaaatttaaaccttttttctgagctattgatacaattaacgggaattaggtataagtttggcctgcctggtaaccataaaacggaccttatgttacataacattgtttagtaacactgtcataaatattgcttttcccccaataaatccctaatttgcgcaacactaaattaatggtatgcgagaaacatactgagtaattactaaaatcttatatattatgaaagtatatcagactaatgaaattaagaacattgccttgttgggaagttctggctctgggaaaaccactctcgtggaagcgatgcttttcgagagtggtgttataaaacgtcgcggatctgttgccgcaaaaaacacagttagcgattatttccctgttgaacaagagtatggttactccgttttctctaccgttctccacgtagaatggaacaataaaaagcttaatattatagactgtccgggttcggacgacttcgttggcagtacggtaactgcacttaatgtgaccgacacagcaattattcttctcaatggccaatacggcgtcgaagtcggtacacaaaatcacttccgatacactgaaaaattgaataagccagttatttttctagtcaaccagcttgataatgaaaaatgcgactatgataatatcctcgaacaactgaaagaagcgtatggatctaaggtggttcccatccagtatcctattgctaccggtccgggctttaatgccttgattgacgtattgttgatgaaaaaatattcgtggagacccgaaggcggtgctcctacgattgaagatataccggcagaagaaatggataaggctatggaaatgcataaagcattggtagaagccgctgccgaaaatgacgaaggactgatggagaaattcttcgaacaagattctctgacagaagatgaaatgcgtgaaggtatccgtaagggcttgatcgccagaggtatgttccctgtattctgtgtttgcggtggtaaggacatgggcgttcgccgtctgatggaattccttggcaacgtagttcctttcgtgtctgaaatgccgaaagtggaaaacacagatggtaaggaagtggctccggacgtaaacggtcccgaatctttatatttcttcaagacgagtgtcgagccgcatatcggtgaagtatcttactttaaagtaatgagcggcaaggttcgtgaaggtgatgacttgctgaatgccgaccgtggttcgaaagaacgtatcgctcagatttatgtcgtagccggtggtaaccgtgtgaaagtggaagaacttcaggcgggtgatattggtgctgccgtaaaactgaaagatgtgaagacaggcaatacactcaacggtaaagactgcgattataaattcaactttatcaaatatccgaattctaaatattctcgtgctatcaaaccggtgaacgaagcggacgtggaaaagatgatgaccatcttgaatcgtatgcgtgaagaagatccgacatgggtgatcgagcaatcgaaagagttgaagcaaacactggtacacggacagggagaattccatttgcgtacgttgaagtggcgtctggaaaataatgaaaaacttcaggttaaatttgaggaaccgaagattccgtatcgtgaaacgattacgaaggctgcccgtgccgactatcgtcataagaaacaatccggtggtgctggtcagtttggtgaagttcacctgatcgttgaaccttataaagaaggtatgcctgtgcccgatacttacaagtttaatggacaggaatttaagattaccgtgagaggcactgaagaaattccattggaatggggcggtaagctggtatttattaacagtatcgtaggtggctctattgatgcccgtttcttgcctgctattatgaaaggtatcatgtcacgcctggaacaaggtccgttgacaggttcgtatgcccgtgacgtacgtgtaatcgtatatgacggtaagatgcacccggtagactcaaatgaaatctcctttatgcttgccggacgtaacgcattcagtgaagccttcaagaatgccggtccgaagattttggaaccgatttatgatgtggaagtatttgttccgtccgacagaatgggtgatgtgatgggagatcttcaagggcgccgtgccatgattatgggtatgagcagcgaaaaaggtttcgagaaacttgttgctaaagtacctttgaaggaaatgtcttcatattcgacagcgcttagttcacttaccggcggacgtgcttcatttatcatgaagtttgctagttatgaacttgttccgacagatgttcaggataagttgattaaggattttgaagctaaacaaacagaggaataaactataattctctcaaaactgttaaaaccgttgtcttttttaagtaaaaggcagcggtttttgtttaactatgattaataaagatggaaaatcgcaaggaaaagatttaattttttattaaatttgcaaaccaaaggaggagttatattgttgtagtaatcagaatacaacctaaatagctctttacggttaatttccgggaacttccggttaaatcaagttaatgtgttaggagtgttaattagggagtgttaattttgttgctatgaagaagtcaacaatttggatattaagtattgtaatggggctttctttccttagtctgttgtatttgcaggtcagttatatagaggaaatgatgaaaacccggaaggagcaatttgattcggctgtgcgcaacagtttggatcaggtttccaaggatgtagaatatgcagaaactatgcgctggttggttgaggatatttcggatgctgaaagaaaagcgctgactgaaaacaatacttcattagggcagaataatgtagttcgggggacacagcgatttcaagtgaagtcacgggatggcaagattatttctgactttgaattgagggtgatgaagatcaaaccgtctgaacttcctaaagcgatggtacgtggacgaaacacgattcctcagacttctaattcgatgttggaagctatcaagaatcgctatatgtatcagcgggcactgttggatgaagtagtgttggacatgattagacgtgcgagtgacaagtcgattggtgatagagtacggttcagggaccttgacgattatctgaaatcgaacttatataataatggtatagacttgccttatcattttgcagtgattgacaaggatggacgtgaagtataccgttgtgcagattatgaagcaaaaggaagtgaagaatcctatcagcaggcattgtttaaaaacgacccgcctgcaaagatgagtattctgaaagtgcatttcccgggaaagaaggattatatttttgattcgatcagtttcatgattccgtcactgatatttacgttggtgttgttggtgacattcatctttacgatttatatcgtattccgccagaagaagttgacggagatgaagaatgactttgtcaataacatgacgcatgagttcaagacgccgatatcgactatctcgctggcagcgcagatgttgaaggaccccgcggtagcaaaatcaccgcaaatgttccagcatatatcgggagtcataaatgatgagaccaagcgcttgcgctttcaagtggaaaaggtactgcagatgtcaatgttcgaccggcagaaggcaacactgaagatgaaggaaattgatgcaaatgaactgatttcgggagtgatcaatacctttgcactgaaagtagaacgatataatggtaagataacatcgaaccttgaggcagccgatcctgttatatttgcagatgaaatgcatcttaccaatgtgatcttcaatctgatggataatgcggtgaagtataagaaagcggaagaagatctggaactgaaagtgaaaacgtggaatgaatcgggaaaactgatgatttcgatacaggataacggtatcggtatcaaaaaggaaaacctgaaaaagatatttgaaaagttctatcgtgtgcatacgggtaatctgcacgatgtgaagggctttggactggggctggcttatgtgaagaaaattattaccgatcataaggggaccattagagcagaaagcgacctgaacgtaggaactaaatttattattgcattacctttattaaaaaataattgatatggacgagaaactgcgtattttattatgcgaggatgacgaaaatcttggcatgcttttaagagaatatttacaggcaaaaggttattctgctgagttatatcctgatggagaagccggttataaggctttcttgaagaataaatatgacttgtgcgtgtttgacgttatgatgcctaaaaaggatggctttacgttggcacaggatgtccgtgctgcgaatgctgagatacctatcatcttcctgactgcaaaaacgctgaaagaagatatcctggaaggatttaagattggtgcggatgattatatcacgaaaccattcagtatggaagagttgactttcagaattgaagctatcttgagacgtgttcgtggaaagaagaacaaagaaagcaatatctacaagatcggtaagtttactttcgatactcagaaacaaattctggctacagaaggcaagcagacgaagctgactaccaaagaatctgaacttctcggactgctttgtgcacacgctaatgaaattctgcaacgtgactttgctctgaagactatctggattgatgataactacttcaatgcccgtagtatggatgtgtatattacgaagttgcgtaagcacttgaaagaagatgactctatcgagattatcaatattcacggaaaaggctataagctgatcacaccggaagttgaatcttaatgagtactccgataaccaaaaataaaaaatcccggaaacattcgttcccgggattttttattgatttctaataaattaatcagcgatcttcttattaatgacaatataagaaatgagtcccagtactacgaggaatactgaactgcccaaaaccgcgttgttgtttacattgccggtaaaggaacaagccaacaggatgaccactccgatcaagattaatatcaatcccaaattctttaataagcctttcatgcgtgtgtattttaatagattataatattccagtcacaaattaaagcataattctttaacgggcgaaataatttaggtgaaaaatccattataaagacagatttagtggattttatgaattaaacgattgtttttctgtttagtctttggtattgtagaataccttttttaagacctcttgcccgatgctcagttcttcgagagtgatgccatgcagagcttccttcagtgtctgccccgcaatgatgcgtgctttctcttccagttcttttccgtcttttgttaggtggatcagattggtgcggcgatcttttttgtcggaaatacgtactacaagatgctgccgttccatgttatctatgaggcgggtcatactgggtttgtctttaaaagttgcattgcacaactcttgttgtgtaacgccgtctttttcccatagaaaaatgagaaccgtccattgttccgggctgatttccagaccgttctgacggaaattgcgatatagcttccggttgattgctgcggaaaccttaccatttaggatggcgaatataagccggatatcgaaattaaattgctctatcatgaaattattgtttaaacaactttgcaaaggtaagccacttcctggataattcctacattaggatacaaaaaaagattaaatatttgtagttcaaaataaaatgcctaactttgcacccgcattttaaaataaaataaattatttatttaattaaacgagtatgaatcaatacgaaaccgttttcattttaactcccgttttgtctgatgttcagatgaaggaagcggtagaaaaattcaaaggtattcttcaagctgaaggtgctgagattatcaatgaagaaaactggggactgaagaaattggcttatccaattcagaagaagtcaacaggtttttatcaattggttgagttcaatgcagatcctactgtcattgacaagttggaacttaacttccgtcgtgatgaacgcgttatccgcttcttgactttcaaaatggacaagtatgctgcggaatatgctgctaaaagaagaagtgttaaatcaaacaaaaaggaggattaatcatggcacaacagactcaatcagaaatcagatatttaactccgccctcagtagacgttaagaagaaaaaatactgtcgtttcaaaaagagtggtatccgttatatcgactacaaagatcctgaattcttgaagaaattcttgaacgaacaaggaaagattcttccacgtcgtatcactggtacttctttgaagttccaacgtcgtatcgcacaggctgtgaagagagctcgtcacttggcattgttgccttatgtaactgacatgatgaaataagaaggaggaaaagtatggaaattatattgaaagaagacatcgtaaacttgggttataagaacgatatcgtaaacgtgaaatccggatacggtcgtaattatctgatcccgactggaaaagctatcatcgcttctccttctgcaaagaaaatgttggctgaagacttgaaacaacgtgctcacaaacttgagaaaatcaagaaggatgctgaagcattggctgctaagttggaaggcgtttctttgactattgcaacaaaagttagttcaacaggtactatcttcggttctgtaagcaatatccagattgctgaagcattggcaaaactgggtcacgaaattgacagaaagatcatcgttgtaaaagacgcagtgaaagaagttggtaactacaaagctatcgttaaacttcacaaggaagtttctgtagaaattcctttcgaagtagttgctgaataagagcaaatttacttcatatattaaaaaagcgatttgttctgatggataaatcgcttttttttatcatctttgctagtaatatgaaattcaaccgttgttatctgaagagaatcgttttgctgttcctggttgctctgggaatcggcaatgctctttatgcaaataacgaattgaaaatactggctgactctctgcataaaatgatagatgcgaagcctctcttcgtccagaagaaagagcagcgaatcgcccggattaaatgtttactgaaggactctgggctgactcccgatcgggaatataaggtgaatctccaattatacaatgagtataagaaatttaatatagactctgccattcattatgtcgaccggaaccttgaaatcgctcgtcagttaaatagaaactatttgaaataccagtcttctttgcaactcagccttgtatattccatgtgcggcagatatagagatgcagaattacttctcgaaaaaatgaagccatcagaacttcctcgttcattattagctacttattatgatacatatgcccgtttttgggagtattattcgatttctgctaccaataatcagtacggaaaaaaacgggaagcttatcaggattcactgtatgctcttatggatcatacttcctttgactataaattgtcacgggcttattcttatgcaggacgcgattcaacaaaggcgatcaagattttggatgagttgctgaatgctgaggag

SEQ ID NO: 4680 - DNA, 2304 bp, Unknown
  gut microbiota DNA sequence
gccacacgtgaaacggcctccttgcaggcacttgcactgatacaatatgaggaaaataatttagcggatgctttcaaatttactcagtcggctattgatgatgtagtttcctccggcattcatttccgggcaatggaaatctataaattctattctatcattaatacggcttatcagacggaagaagctaggtctaaatcgaatctgattacttttcttatctcaaccagcgtttctctttttcttttaatcgtgttggttgtgtttatttatattcagatgaaaaaaacgttgcggatgaaacgggcgctggcacaaagtaacgaggagcttctgagattgaacgacaaactgaacagcatgaatagtgagttgaatgataagaatgatgaactgtgcgagattaataatataaaggagcattatatcgctcagtttttcgacgtgtgcttcagctatattcataaaatggagaagtatcagaatatgctgtataaaatagccattaataagtgctatgaggaactgattaaaaagctgaaatcttccgcattgattgatgatgaacttgatgctctgtatactcgcttcgatagagtctttttgaatttatatccgacttttgtttcagatttcaatgctttactgaaagatgacgagaagatcattcttaagcaggacgctttgttgaacagggaacttcgtatctatgcattgttacgtttgggtattacggatagcgggaagattgccaacttccttcgttgctctacaagtactgtttataattatcgtactaaaatgcgtaacaaggctgcagtggaccgggatgaatttgaaaatgaaattatgaaaatctgaccaatataaacgaatttgtgccatccaataaataaaatgctttccaaacaatctacattttttatattcctaaatgattgtaagttgttgatttgtaaggtttaatgttattttataatctacataaagttgtgtagactaaataaagcgttatttatttggctagttttgcgatatcagttttcgaacaatctgcctacagatgaaaattgataccttttatgttgtttgtacttaaattcgcaattttttatggatgcacaattttcacttgacacaaaaataaaagtaggaataatcggtttcggtagaatgggaagattctattgggaggcgatgcggaaaagcgggcgatgggagattgcctatatttgcgatacagatcctaccacgcgcgaacttgctaaaaaaatatctcctgaatctcgtgtagtagagaatgaccaaaaaatctttgaagacgagagtgtacaggttgtcgggctcttcacattggcagactcaaggctcgaacaaatagaaaaggctattcggtacggaaaacatatcatcgcagaaaaacccgttgcagatacgatggaaaaggagtggaaggtggtggatatgatagaaaactccaatgtactttctacggtgaacttatatctgcgaaattcctggtatcataatctgatgaaggaatatattcagaagggagaaataggtgagttggccattattcgtatttgccacatgactccgggactggcaccgggtgaaggacatgaatatgaaggccctgctttccatgattgtggaatgcattatgttgacatcgttcgctggtatgccgaaagtgaatatagaacatggaatgcacaaggcgtgaacatgtggaattataaagatccctggtgggtacaatgtcacggaacttttcaaaatggcgtagtctttgatataactcagggttttgtctatggacaattatcgaaagatcagacgcacaattcttatgtagatattataggtacggaaggtatcgtgcgtatgacgcatgatttcaaaacagctgtcgtcgatttacacggagtacatcagacacttcgtgtggaaaaaccttttggtggtaagaatattgacgtgctgtgcgatttgttcgccgattccatattgaccggtaagcgaaaccctcgtttgcctttaatgtatgactcgactattgcatccgaatatgcgtggaagttcctgcaggatgctcgtatgaatgacttgccggctattggcaatttacagactcttgaacaaatacgcgaacgcagaaaaaacatgaaaaatggatatgggttgctgcatagtaatccaccacaaataactaactccttaaaataataaaaccatgtcagacttttcaagaagaaaatttcttaaaacgggagccgctgctttagcaggaatcaccat

SEQ ID NO: 4681 - DNA, 1497 bp, Unknown
  gut microbiota DNA sequence
acgtattccgaacttgctaacagtgcagtagttgttttatatgcttccctgcttattgcattggtagtatggggtatggatgtctgtttccagaacttcatggaaaaaattgtttatccacattaaaaaattaggaattgaaaatggctgagattgaaaagaaatggtacgttctgcgtgctattagcggaaaagaagctaaggtaaaggaatatcttgaagctgaccttaaaaacagcgaccttggtgaatatgtatctcaggtattgattccaactgaaaaagtgtatcaggttcgcaatggtaaaaaaattgtgaaagagagaagttatctccctggttacgttttggtggaggctgctttggttggtgaggtcgctcatcatctgcgcaatactccgaatgtgataggctttttaggcggctccgagaaaccggtgcctctcagacaatcagaagtgaatcgtatacttggtacagtagacgaactacaggaaacgggtgaagaactcaatattccgtatgtagtgggtgagactgtgaaagttacttttggtcctttcagcggattcagtggtatcattgaagaagtgaatagtgaaaagaagaaactaaaggtcatggtgaagatattcgggcgcaaaacgccgcttgaattaggctttatgcaagtggaaaaagaataacgcggaattgttacgctgttgttgttcttcgtttaatgtttatatataaatcaataaaaaaatggctaaagaagttgctggactaatcaagttacagattaaaggaggcgctgcaaatccatcacccccagttggacctgctttgggttccaagggtattaatatcatggaattttgcaagcaattcaatgccagaacccaagacaaggcaggtaagattttgcctgttatcattacttactacgcagataagtctttcgattttgtaatcaagactcctcccgttgctattcaattgcttgaagtagctaaggtaaagagtggttctgctgagcctaaccgtaagaaagttgccgagcttacttgggaacagattcgtacgatcgctcaggacaaaatggttgacttaaactgttttactgtggatgctgccatgagaatggttgctggtacagctagaagtatgggtatcgctgtaaaaggggagttcccggttaataactaataaacttcaattgtaatgggtaaactgacaaaaaatcaaaagttagctgcagaaaaaattgaagcagggaaagcatactcactgaaagaagctgcatctttagtaaaagaaattactttcactaaatttgatgcctcactggatattgacgtacgtttaggtgtagacccacgtaaagctaaccagatggtgagaggtgttgtttcacttcctcatggtactggtaaagaagtacgtgttttggtactctgtacaccggatgctgaagctgctgcaaaagaagctggtgctgactatgttggtctt

SEQ ID NO: 4682 - DNA, 3950 bp, Unknown
  gut microbiota DNA sequence
ttcctgctgagttcccgacaaacaatctgtcagccgatgtatatgcaactgaaagcggaacattgaatgcaatcgttgtgggtaatactcaaggattagattcaaaaaaagacacagctacagtcgtttgggcttcagaagatggcaaagcctggattccaatggggattccatcaaataacaactgtccgaaattagtagacccgtctattatacattataacgacgcattttacatttgtggaaaagaaactaaagatgatgctaagggattccagaaattctatacctccccgacattacttgtatggaaaggggtagacagaatgttcatgcttcccggaattcttcctccggtgaaacttgaaggaggagtaatacaatatccttattccgagttcagcttcaagggaaaagaagcaaactacacgatggtagttgacagaaaccattatatatggatggtaggtggtcaaggtattgacaaaatctggcgtggtagagttaataaactcggatttctaatacagtaataagaagtagttaaatacgaaccttataatcaaaacatgtcctatatagagaaaatagacaaaaatcggattccccagcacatagccatcattatggatgggaatgggagatgggctaaacagcggggaaaagaacgaacttacggtcaccatgcaggcgcagaaacggtacataaaattatcgaggatgctgcacgtctgggggttaaatatctgactttatatactttctccaccgagaattggaatcgtccgcaggaagaagtagcagctttaatgaatctattgctggattctatcgaagaagaaacgttgatgaagaacaatattcgtttccgcattattggtgatattaagaaattacctgtagaagtgcaggaaggtctgtcaagatgtatagaacacacagctaataatacaggaacctgcctggtactggcactcagctactcttcccgctgggaaatgactgaagcagtccgacagattgcaacgcttgcaaaaacgggagaaatatctcccgaacaaataacagatgaatacataactgctcatctgaccacaaactttatgcccgatccggatttactgatccgcacgggaggagaaatccgactaagcaactacctgctatggcaatgtgcttattcggagctttatttttgtgatacattctggccggacttcgataaagaagaattctgtaaagccatttatgagtatcagcaaagagagcgccggttcggcaaaacgagtgaacaaatcagctaacataattcgaaacttcaaattataacataaatgcattatcgtatttcctttatattcgtaacgtttatcggcctgttctgctttgcagccacgggctttacgcagaataccaacactgacgaagactctaagccagtcatcttatactcaggaacgcctaaaaagtatgagatagcagacatcaaggttgaaggcgtgaagaattatgaagactatgtgttaatcggattatccggactgtccgttggacagacgattaccgtgccgggtgatgagattaccggagcaatcaagcgctactggaaacatggtttgttctctaacgtacagattactgccgaaaagatagaaggcaacaagatttggttaaaaatcagtctgacacaacgtccccgtattgcggatgtacgctatcatggtgtgaagaagtcagaacgtacagaccttgaaagcaaactgggtatggtaaaaggtatgcagatcactccgaataccgttgaccgtgcaaagacattgatcaaacgttattttgacgataaaggctttaagaatgcagaagtgattatcgcgcaaaaggacgatccatctaacgaaaatcaggtgattgttgacattgatatcgacaagaaggaaaagattaaagtgcacgctatccatatcaccggaaactcggccatcaaaacatccaagctgaagaaagtgatgaagaagaccaatgaaaaaggcaaacttctgaacctgttccgcaccaagaaatttgttccggaaaactttgaagcagataagcagctgatcatagataagtataacgagctgggatatcgtgacgcaatgatcgtaaaagacagtgtagcacagtacgatgcaaagacggtagatgtatatatggatatagacgaaggtcagaaatattaccttcgtaatgtaacatgggtaggtaacacactgtatccttcagaacagctgaacttcctgctccgcatgaagaagggtgatgtttacaaccagaagttgctgggagaacgtacctctacagatgacgacgcaatcggtaacttatattacaataacggttatttgttctacaatcttgatccggtagaagtaaatatcgtcggtgactccatcgacctcgaaatgagaatttatgaaggccgtcaggctacgattaataagatcaacatcagcggtaacgaccgtctgtatgaaaacgtagttcgtcgtgagcttcgcattcgtccgggacagttgttcagcaaggatgacctgatgcgttcattacgtgaaatccagcagatgggacactttgaccctgaaaaactgcagccggatattcagccggaccctgtaaacggaacagttgatataggtctgcctttgacatctaaagccaatgaccaggtagaattctctgccggttggggacaaacaggtatcatcggtaagctgagtctgaaatttaccaacttctctgttgccaacttgctgcgtccgggtgaaaactaccgtggtatcctgccgcaaggtgacggacagacattgaccatcagcggtcagacgaatgctaaatactatcagtcatatagcatctcattcttcgatccttggtttggaggtaaacgcccgaactcactttccgtatcggctttcttctcagttcagactgacatcagcagccgttactacaactcaagctatttcaacaactattacaatagttattatgcaggctatggtggctacggctcatacaactacggtaactacaacaactatgagaactactatgaccccgacaagtctatcaagatgtggggactttctctgggttggggtaagcgtctgaaatggccggatgactactttactttgtctgcagagctggcttaccaacgctacaacctgaaagactggcagtatttcccggtaaccaacggtaaatgtaatgacctcagcctttcactaactttggcacgtaactctattgacaacccgatcttcccacgtacaggttcggacttctcgctgtcagttcagcttactcctccgtactcattgtttgatggtaaagactataaaggttatttctataatcccgaaagcgacagaggcatcactcaggataatatgaataaacttcatagatgggttgagtaccacaaatggaaatttaaagccaaaacatatactccgttgatggattatatagcacatcctaagtgtctggtattgatgacacgtacagagttcggtttgttaggtcactataataaatacaagaaatcaccgttcggtacattcgacgtaggtggtgacggtatgacaggttactcaagctatgcaacggaaagtatcgccttgcgtggttatgaaaacagttcattgacaccgtatggagaagaaggatatgcttacgcccgtcttggtatcgaattaagatatccgttgatgctggaaacaagtactaacatttatgtgttaggtttcctggaagccggtaatgcttggcatgatatctctaaattcaatccgtttgatttgaaacgttctgccggtgtcggtgttcgtatcttcttgccgatgattggtatgatgggtatcgactggggttatggtttcgacagaataggcagtaccaaagactac

SEQ ID NO: 4683 - DNA, 401 bp, Unknown
  gut microbiota DNA sequence
tcacagaaggtcgtgctacagtcgatttggcccgcttcatgcagggtggtgtcccgttgtctacatcggcttttacacgggaaatcgtgaacaggatagaagcttccgcaaataattcccccataaaccagacaaaataaaaatattatgaagaaagaatatttgatttacaaactttccgaagacctgaaagaagcgacccggattgagaacgaactgttcaagaagtttgatgtgaagcgcggattgcgtaatgaagacggtacaggtgtgctggttgggctcaccaagattggcaacgtagtggggtacgagcgcattccgggcggaggtctgaagcctattccgggcaaattgttctaccgtggctacgaccttgaggatttggcacatgccattct

SEQ ID NO: 4684 - DNA, 16830 bp, Unknown
  gut microbiota DNA sequence
ctgttttcaacatctgcttcgatagtaccgtcgaattgaccgtgcattgtgtcatacttcagcatgtaagccaagtagtctaccgggcaaaggtcgttgatacctacgatttgaatatcgtttcttttcattgcagcgcggaaaacgaaacgtccgatacgtccgaatccattaatacctactttaatcattttgtttaaacttttaagggttttataatatttgttcaaatatctctcagctcgcgcatttgttttattttcaaatgcggtgcaaaattacaaaaatgtttttatattcgcatattaaattcacattaaatattgaaaaaagatgggaaagagcacatttttacaagactttaaggcgtttgccatgaaagggaacgtcattgacatggctgtcggtgtagttatcggcggcgcgtttgggaagatcgtatcgtcactggtggcgaatgttattatgcccccaataggcttattggttggtggtgtgaactttacagatctgaaatgggtaatgaaagcggctgaagttggagcagacggtaaggagattgctcctgccgtatctctggattatggacaatttctgcaagcaacttttgactttctgattatagcttttgctatattcctatttatacgtctgatcactaaactgaccacgaagaaggcggcagaggaagccccggctgctcctcctgcaccacctgctcctactaaagaagaggtgttgctgactgagattcgtgacttgctgaaagagaagaaataagtacttgtataatgaataggagattctgttttgagtctcctatttattatatataagtctctctgacatcgtttcccttttcggattttatgttgtccgatgatatatttctctcgtaaatttcgatttttctgtttattcttctatctttttgcctacttttttctacttttgcaaatcatttattcaaaatccaaccattgatatgcaggagaaaataataattcttgatttcggttcgcagacaacacagctgattggtcgtcgcgtacgcgaactggacacgtattgcgaaattgttccttataacaagtttcctaaagaagatccgacaattaaaggagtcatcctttccggaagtcctttttcggtttatgataaagatgccttcaaagtagacttgagtgagattcgtggtaaatatcctattttgggtatctgctatggtgcacagtttatggcgtatactaacaatggaaaagtagaaccggccggtacacgtgaatatggccgtgcacatctgacttctttctgcaaggataatgtgctgtttaaaggagttcgtgagaatacgcaggtatggatgagtcatggtgatacaatcactgctatccctgataattttaagaagattgcttcaactgataaagtggatatcgctgcttatcaggttgagggtgagaaggtatggggcgttcagttccatccggaagtgttccatagcgaagacgggacgcagatattgaggaatttcgtagttgatgtttgcggatgcaagcaagactggtcaccggcttctttcatcgagagtacggttgctgagttgaaagctcagttaggtgatgataaagtggtgctgggattgagcggtggtgtagattcatcggttgctgctgttttgctgaatagagctatcggtaagaatctgacttgtatcttcgtagaccacggtatgctccgtaagaatgagttcaagaatgtgatgaacgattacgaatgcctcgggctgaatgtaattggcgtggatgccagcgaaaagttctttgcagagcttgcaggtgtgacggaaccggagcgtaaacgtaagattatcggtaagggctttatcgatgtattcgatgtggaagctcacaaaataaaagatgtgaaatggctggctcagggcactatttatccagactgcatcgaatcattgtctataacaggtacagtgatcaagagtcatcataacgtaggtggtctgcccgaaaaaatgcacttgaagttgtgcgagccgcttcgtctgttgtttaaggatgaagttcgtcgtgtaggtcgcgagttgggtatgccggaacatctgattactcgtcatccattccctggcccgggtttggctgtacgtattcttggagacatcacccgtgagaaagtgcgtatcctgcaagatgctgatgatatttacattcagggattgcgcgactggggattgtatgatcaagtatggcaggcaggcgttatcttactgccggtacagtctgtaggtgtcatgggagatgaacgtacttatgaaagagcggtagcattgcgtgccgtgacttctactgatgccatgactgccgactgggcgcatttgccatatgaattcctgggtaagatttcgaatgatattattaataaggtgaaaggtgtaaaccgcgtaacctatgatatcagttctaagccacctgcaactattgagtgggaataagagattttcttgatttatataaaattccagtatcgcaagttactggaattttttttatgtaatataccctttacttcttattacggcctattcgccagagattgttggtgaaggagaaaatattattatatatggtagaaattaaggtgtgcattttatttcttatgcatttattcttttggggatctactaccttttttatttagtaagtttaggaatatatatagttgtgcttggctgttatgattcatttttatatttaacagattgggataagttgctctagaacttggtaattttataccaataagtgtattttttcctgttttcataggcttttcaaaggttattaagtttgtgtgccacttaagacggtgtaaagttattaataaaattggtaaacgcaatgttttttttattttaattatcggcaaacggtattttttttgatttttcattctactactcagatcgtaataagatagatataatctttttattgatgtatattattgattatcatgattttattgttttgattaccaagttctagagcgacttattctaatcggtcaattacgactatatttcttaataattatttatgataatgcgaaattgtaggccgcctccgggcagtgattaaatttttattatcgtttcttcagcatagatcagaacagtgctgaagagagattgaattcattaaaaatttcaatacccccaagaaaaacaaatgaatgataacagtcaaacacaactatatatattcctaaacttactaaatattaagataaagcatacacacccaaaaacaaacgtattagagtaaaaatgcacatcttatttctaccacattatcataatgcctagatatagaatagtaagttttctacttatccatattaacccaactaattattaacctttaatcacagaaaaacaatgcaaaaaagaactatttttttgacattttttgccgccgtatttgtctatctgacttcatgttcggatagtaagaatataggaagtgcagtattcaatccggatcaacctattgaggtgaccggattttatccggattccggtgggatcgctacccctatgatcgtcgaaggcagcaacttcggatcagacactaccaatctgaaagtttatttcgaagatgcggatgggataaagcaccaggcgggcttggtgagttcaaatggtaacaaaatctacttgtatgttccttcgggactgacgtacaagaaagaaatgaatcttcttgttgcccgaacaatgcccgacggaacagaatatgaaggacaagccggaaggcaatttatctacaagacgcagacgagcgtgactaccgttgtaggacaagcttcgccggacgctaaccagcctacggtaggaggagacatcgctacttctacattgtcggcgcccaactacattagtctggatgacgaggataatatctttatcaccgaacgccacgtatggcacggaggaaacaattatccatctgtaacctgtcaaaatgataaaggagcgcagtctaacggaaatattgtcatggcttccattaagagtaattctgtgctggtacttcagtatggtacgtcagccatcctgaatgctcctgctttttcggacctggatggtacgatgtacgctcctgaagatggcggtatgggatattattctttggccaaaagcgtgagctatgcgccgcgccgcctgacggtgctgctgaatgatgaaactaaagacgttgccgatggtaactataagcactgctttgtagtgaataagctggatcattacatttatacagtgatggttaagggacaactggtgcggataaaaccgaacacccgtacttgtgaactcctactcaagaaagtcggaacttctaccagacctgatgcatgtgactcataccttgctttcagccctgtcaaaggacaggaaaatatgctttatgtcgcgatggcagaaggaaatcagatatggcgagtggatgtgggaaatctggaaggtaaagacaaaaacacctatcccggtgaaggttatgccggaaaggccatattggaaggacaggtagcaggagcaggatgggaagacggtttgctgaggaatgccaagtttgataatccccatcaaatctgctttaccgaagacggtaaattgtatatcgctgattgtggtaacaattgtatacgagtaatcgataccaaattgcccttggatagagctatggtaactactcctatcggacttccgggcatgaagggctataaagacggcggtccggatatcgcgttgttcaatcatccgttcggtgtagctgttagtgccgacggacaaattgtatatgtcgcagataccggaaataaagtgattcgtaaattgtctatacaataacctttgataatacatatatgaaaaaaaatcttttattgattgtactgcttatgacattgattccattggcaggctacagtcagaacgaaacgagtacacagtttacagtggcaggcgtgattgtggatgcaaccggcgagccattggtaggtacggctgtttatgtaaagaacgaaccgggagtcggcgtagtagcggatctggacggaaagttcaagataaaagtaacgaaaaacgctacactgatattccagtcagtgggtatgaagaatgtcgagatgctgattaccaaaaacgaagaaaagcttaagatcgtcatgaaagaagacgagactaagattgacgaagtagtggtaacgggtatgagttcccagaaaaaagtatctgtggtaggtgccatcaccaccattgacgttgcgcagctaaaaactcccgccacttccctcaataatatgatcggaggtcgaatggcaggtgttatcactatgcagagttcgggtgaaccgggcaaaaatatctccaacttctggattcgcggtatcagtactttcggagccagcagtggagccttagtactgatcgatggtctcgaaggaagattggaagatattgataccgacgacgttgaatcgttcagtatcctgaaagatgccgcagcaacggctgtctacggaacacgcggagcaaatggcgtggtattggtgactaccaaacgtggtaccagtggaaaattagaggtgaccggacgtgctacgatgaaaatatcacatatcaaacgtctgcccgaatacctgggagcatatgattacgcactccttgccaatgaagccagagcgatgtctggggaagacgatctgtacacccgtcttgaactggatctgatcaaaaacaggctggacccggatctttatccggatgtaaactggatagatgaaatcatgaaaaggaattctattcagcagaactactatgtcagtgctaaaggaggaggtgacgttgccagatacttcttgtcgctggggtatcaggatgaaggagccgcctatcgccaagaggaaaatctgtttaaaaagccattgagcgtaaacaagctgaattatcgtgccaatatcgatatgaatttgaccaagacgacccagctatacttcggtgtagatggatatgtcaattcttatgtcagtccgggcggagggaacacagatctggtatggtcagccgtccagcagttgaccccccttctgtttccggtcacttactctgacggcacgctgcccgtatatggcggatcacgtgaattggcttctccatatgttatgctgaataataccggatacatgcaaagcgaggacaaccgaaacatgctgacgctgaagctgacgcaagaattcggaggatttctgaaaggactgacgatgtcggtacaagcgatgacggaacatatcggctacttcagcgaataccgcaggatttggcccgacctctaccgtgctaccggacgaaccgcacagggagtcttgattaaagcgctgcgctcagcacaatcaagtatggcatacggaagtggcgaaaactcttacaggcaatactatatggaggcgaaagccaactggaaccggtcgttcggagaccatacctttggcgcgttgctcgaatactatatgaaagatgagaaaaactctctatggggcaaatatgatgatttaggtatcgccagcatccccaaacgccatcagaacctttccggacgtatctcctatgactataaaaaccgttatttcatcgatgcgaatttcggttatacaggttctgcacagttcaaaaaaggagaacagttcggtttctttccttccattgccgcaggatgggttccttcctcttatgcatggtggacagagaaactaccttggtttacgttcctcaaaattcgcggctcttacggtatcgtaggtaacgaccagattgtttctaccaacgattataccggccagggacgcttcccttacctgaccctgatagacaatcatgccggatctgcttggggatatcgttatgcgggtatcacagaaacccataccggagccgacaatttgaaatgggaagtagcaaagaaggcgaatcttggtatcgatgccaagttctttcacgacaagttgtccctgacagtcgacatattccgggatactcgtgaccacatcttccaggaccgtgtgacgttaccttcttacgtaggtatggtgacttatccgaagtcgaatgtcggacgtatgcacagtgtaggatcggacggaaatattgagtttttccatactattaataaggatatgagttttacggttcgtgccaattatacattctcacaaaatatcatcgactattttgaagagaataaattaccttacgactatctcagtgtgaccggcagaccctttaacatcttacgcggatatatctccgagggactattcgccagcaaagatgagatcaataccagccccgatcaaagcggattcggaaagatacgcccgggcgacatcaaatatcgcgatgtcaacggcgatggtattatcaatgaagacgataaggtgccattgtcttattccaaccagttaccaagagtgatgtatggattcggtggtgacttccagtggaaagatctgactgttagtgtcttgttcaaaggttccgccaaggtagactactatcgtgcagggcttggaaacgacaacggatggattccgttctataatggagacttgggaaatgtgatcaaactagccaacaatcccaagaacagatggacgcccgcatggtattcgggaactactgaaacggaaaatccgaatgctgaatttccacgtctctcttacggaggtaataagaacaattctcaattgtcctccttctggaggcggaacggttctttcctgcgccttcaggaagttagcttgcgatacagcctgaaacatctgccatggattaaagcggtaggattgtcttccgtcgatctggaatttgtggcgaataacctgtgcactttcgacaatgtgaaatatttcgatcccgaacaagcatcggcaaatggtgctgtctatccgatacctgctacctattcattccaggtatacttaagattctaatcacataacattgaaaaatttatgaaaaatcgaattaaaatacttttgggagccgtgatcggcagttctttgctgctcagttcctgcaattttctggatgtagacaattattttcaggctacattcaaggaagattccattttccacagcatgaaaaatgccgaaggatacctttggaacaccccgacccgttttcccgacgcgggtgccatttggggaaactcatggaatccgggagaaactgcctcggacgagattgccgtcagatggcagaccaacgagttttggggagcgcaattcagtgttggtactgtcaacggaagaaacctgcggcaggatatatggtatagcatgtatgtagtagtggcaagatgtaaccggatgctggaaaatatcgataaagtgtctgatatgacagaagccgacagaagacgttacatcggatacgtacactttatgcgcggttatgcctactaccatttactgatgaactacggtccgttgctcattgtcggagacgaagtactaggtacttccgaatctgcggaatactatgacagggaacggtctacatacgatgaatcggtggattatatttgcaatgaattcaagcttgccacacaaggtatttatggaccgaccgagcagagtatcagctattccgaccgtcctaccaagggggcagctttagcgttgattgcccgtctgcgcctgttccaagcttctccgttgttcaatggcggtgatgccgcccgcttgtgctttagcaattggaagcgcaaaagcgacggtgccgattacgtaaaccagacttatgatcccgaccgttgggcggtagcagccgctgccgcaaagcaagtgatcaatatggaatactattcactgttcacagtggcaccggacaatcaatacccttatccgttggcagataatgttcctacggctcctttccccgatggtgcgggtggtatcgacccttaccattcttttgccgatatgttcaacggtgaaggtattattcaaaccaataaagagtttatctgggcaatggcatcccaaaatgtgactaattacacgcaccactcgttccctgttaaattcggaggctggggcggcatgtccgtacctcagagagtggtcgattgcttcctgatgatggatggcagagacatccacaatgcatcggcagactatccgtatgtagcggatctcagtcagacaataggtacgaataaagtgctgggaaactatcagttgagaggtgatgttccgaagatgtatgacaaccgttcggcacgtttctatgcttccatcggatttcccggacgcttgtggactatgagttccgcttcttccgacgcaacctatgtcaaccagcagttctggtattctcatgatgatacgcaagccgggttggccggtgcgggaaataacgtcaatgattacaatatcagcggctacactcccgtcaagtttgtccatcctgacgattcatggtcgagcggaaaaggaagtgtgaaaggcgcatttgttactcagcctaaaccgtttgccatcatccgttatgccgaagtacttcttgaatatgtagaagcgttgaaccgggtgacgggtacggtcactgttactactcctgatatgacaggtacggatgtcgaagtgactgtcagccgtgatattcaggaaatggctaaatacttcaatatgatccgctatcgtgtcggattacccggtccggctttgggtgacttcaacgaggtggagagatttgagcagatcatccgtaatgaacgacaagtggaacttttcaacgaaggctaccgctatttcgatacccgtagatggggtacttaccttaccgaggatgccaatacgtctaactggcagggattggatgtacaaaaagaccgtacggacgtcgccggcaatccgggattctggaacatcgtgaccattgaccaacagaatatccgcgatcgcgtcgcactgcccaaaatggtatttatgccgatcagtcactctgaattactgaaagtaccttccatggaccagaatccgggatgggacagataatgaaaaacaagaataacagaaagataatatgaaaaagatattaactataattctttgctctgctttggttatgataagtggttgcgataagtatgatttcgatcaggaacagttccgcaaagaagtaaatttactcagtaattccaacttggtatatgatcgccaggtagctgagttgcagcagggaggagatacccttttcgtggtagcttcgttgagtggatcgcaggctaccgacgaaccggtaacagtggtgctgcaacattccgatacactgttgagggcttacaacaaatccaattttgatatcaataaagcccgttttgcaaagtacttgccggaagaatgctatgaatttccaacgatggaaatgaacatttccgccggctcttccaaggctatgtttccggtgtatctgaaaaatctggaaaagatttcacccgactccatctattttctcgaatataagatagattcattgagaacaccggactgtaatccgaaaaagaggcacgtgctgcttcgtatccacaaggagaattactatgcgtccacgcagacggcaacttactacaattacaccagtagtacggtcattatcccgaatccggatgggtatagtgaagttcgccgtccgaccaattccaaccgtgtatttcctatctctgagaactctgtacgtttgatggccggtgatgaaaatttcactgactataccactgcgctggatatcatcaataaggggagcatcattctggaaatgggagcacagttgcccgagaatccgttggcaaaggaactcactatcctgccgtatcaaagcatcgacgtagtgcagctcacacccatcggcgaatatgacaatacgtatttattgaatgtcatccggacgcccgacggacgctccacttattataaggagttccgcctccattacaaataccgtttgaagtctaccgacctctacagggaggtaaatgccaaactgagataccaattcaatccaagagtagaaaacttgtaatgcatctaataatatgaaaaaaaatatactaatcatcggactgacaggaatcctgggaactttcgtagctctctcttcctgtggtcctgattatgaaactgagttcaatgtactgacattgaccattcccagcgagagccaggcggctgttgtttttccgctttccggcggcgaacatgagatagaagtggagaccaacgtggcgctcgataactggacggtaagttcgaatgccgaatggtgcaaactacaaaagcaggaaggtaaagtcacggtttctgccgatcagaatgaaggctataaacagcgtatagcagaagttacgatagcatacggtcaccagagttattccataagtgtgaaacagttcggcttggaaccggtgatcgatatacccggattgacggatgatggaatgaaggcggtggatgctaaagcgacttcactttctatccaggtgaataccaatctgaatctggatgtcatcactgtaccggatacctgtaactgggtacgctttaacgaaccgaaagagctgaaagcaaagaaaggacaaaaagctgtaaaagcggaagatatcgtcaagaaaaatctggtattcagtttggatcagaatactgataccattgtgaggtattgtacaatcacccttcagtcgtcacagaattacaactgtgtcggcacgttcattatcaagcagcagccgagaggatatattgttgacattgacgatgcacacaaggtctttgaagtgaaagcaatgggcgaaacgatcacgattcctttcaaagtgaacggtcctgcgggtgcggaatatgaatatgtgattgacgaaaatgctcaaacatggattaagcctgcaactgcaccgctcaccagaggagcattgcgtgatgcttccgaaagcttcatcatagagcctaacaccgcagttgtagaacaaccccgtgaaggaacgataacgttcacaagtaaagatccggttgatccaaacagctttacagttactgtgaaacaagcaggattcgttcccgttcctcctgtaaatgtggtgaatgctaccgctacaccgggagccggacacatcactctgcaatgggaagcaccggaagatgtggattatagtaaagtgaaaatcacgtattatgataaggtcacaaaagaaaataaagagatagaaatagatggattcaagacaacatcggctatcatagatgatacctatcagtgtgctggtgaatattcctttactttcaagacctacggtcctacgggaatggagactgagagtcctgtaatcattacaggtacttccggtgaagcttccgagttggaacgcgtcattctcactgttgatatgctttctgctaatgcgacacaggacggtgatggaggtggcttacctgctttgattgacggcaaaggtggaacttattatcattccagatggcaagatccagtcgtatcagaagcccattacgtgcagattaaactgaacaaaccgttgcaagggcttcgttttgaatatgatgcgcgtcagactggcataaataatgggggcgacgtaacgatcgcaactatttacggaagtaccaacggtgaatactttgaaagcatgggtacggaagagttcaatttaccgacatcaaacggtggtcatgctaccgctaaaaacaatgtgaatggtaaacaagcttacaactatatccgatttactcctacgggtcgccgtaatcaagccacattggactatactaacgctaataaagcatggtggaatatggctgagatgtatctctacagagtaaggcatgatgaagcctgggccaaagagcagttaggcatctgataaactaatggaaagactggcggggaggaaataagattagattagacacattttcctataaaactccctgtcagtcattttttttatttatattatccgactattgagaatcatgtacatgaaaacaaagaaactgaatatcatattacttgttttgctgctaatctgcacagccgtcggttgtcattcacggcagaaaccggacattcgtccccatcccgtaaatctcagtgccgacagtttttatcaacaggcggtagccatcctgcaatcgtcttatgatgtcgattccacccggaagtgtatcagccttctggaccgggcactgtcgattgacagtctcaaccccgattattatggtaccaaagctaaactactggctgagatgggggagctggattccgcattgcatgtccagactttggcaatggagagaaaagcgataacaggagaatacctgtttcagttaggattgtttcaggcggctaaagatatgaatgctgatgcgcatcaaagtttcggaaaaagtctggaaattctgcgggcagtgctcgaacaatatcctgacagtttgggagcatttattcttgaagaatccgccaatgcgctttatcagggagcagacagcatttatatgaaagacatcgatggcattcgcaaacgtttcccgaacaggcttctggaaatagagatgatccgaaggttgaagccgcattcgctggtgaagcaaatcaaaaagattcagatagagaatgaatataacattgacttcgatttggatagtctggtcaacgaaatggaaaaacaacaaaaaatataaatactatgttattggataaaataaaacatatactatgtatctctcttattctgctggtgggagtcactactctttatgcttgcaagagtgatgataaagagctgcagggagaaccggtgctgcaagttcagaaatccattggattcaagaaagagggtggggaagtagccgtacctgtcaaatcgaaccgggagtggaatgcatcggtaactgagggaaaagaatggctgacggcaaggaaagcatcggatacagaactgacggtttcggcaacatccagtccggaaaaaggagtcagagaaggaaatattactatcaccaataatgcgctgactgctaaactcagagttgtgcagacaggcggtgacctgatcattgaagtgtctgacgagagccgtgtcattcaggtggcggggacaggaaacgatcatatggaagtcaacttgctttccaatacagactatgaagtagttattccggaggaagccaaagactggattaccgagaaagaagtacctgatacaagagctgatctggcatccagtacacgaatattttccatcgcttccaatcctttgactacagaaaggaatgctacgatcaagtttgtatccaaagaaaatacaagcatttatgaccagtcggaaatcaaacaacaaaagaaatcgagtgacatttcgggggtgaatccggagaaggatgtaaaactgaaagttaccggcggatacgacaccgaccatcagccggggcaggatatatcgaagtcttatgacggtcagttcggcggaacctgttatcattccacatggagtcaatctgcaaaattccccgttactcttgaatatcaattcgatcagaatcagcttacgctagactatatcctgtatcacagccgaaatggtaacggtaatttcggagcattcgaactttacatcaagcctcaaggaagtgcggattttgttcatatacaagattatgattttaaaggagcaggaggcagccacaggatattgctgaacgatccggttgtacctgcggctgttcaattcaaagttaaaagcggattgaatgatttcgtcagttgcgacgagatggaatttttccatgctacggaaaatccgcttgacgaacaactgacaactgtattcaccgaccgttcatgcagtgaactccgcccggacgcttccgacgaagtcatcaaccgacttccgtcattctttaatgtgctggcaaagtctttgcagagcaatacttatcccgaagcggaaaagagattcaggatacaggcttatcaggcatacagcgtgcccgaatattggggagataaattgagaaccaattactactcgcctctctgcaaccctaccggtatcataacgaatgcgggtgaagagatggttgttttagtggacggcataccgcaaggtgaatccatttcattaagatgttgttcggatctgggacccgatggtgaagaacgatttctgaaaaacggaatcaacaagttttctttttcacgtgcgggaaatctgtttgtcatctatcagaaacttgatccccgtggcatgctggcagtgaaaatacactttccgccccagtatgtggagacaacggaacatgcgcgtgtaggcttcaatgtatgggatctgactgtggataaaaccgatgatctgttccgcgaatatatccggaaggcaaagtctgtcactttggacggatctgataaatgtgtatttgtactgaaaggtaggaagattctgtttacagcactgaaagacttgctgcaaaatcaggacaacttcaaacaatatggggtagtaaggggaatggaacgatgggataacctgatagattgggagcaggaactggctgctatcgacacttattcgaatacgggagaattcaattcactgatgcatgtcactactttcaccgacggactttatgctaccaattattacattaacatggcagccggtgatgtaagcacaaaagacggatggggattcaaaaacaacttcgatccgcgtgatatggataaaaatcaggacaatgaatgggggccgggacatgaactcggacacatgcatcagggagctatcaactggcccagtactacggaatcgagcaataatctcttttctaattatgtggtgtacaagataaaccagtggggatcacgtggtagttccatcgggacattggctgcttaccgatatgcgcctccgaccccttggagcagattcatgcatccgcgagatccgaacacgctggcatttacccctcaggacatgacatctgatgatgccaataaatatggattatatcaaggagaagcctccgaaatgcatatgcgtctcaaccagcaattgtggacctatttcgaacgtatcggcaagaaaccgaataccatccgtaagatattcgagcaaggacgtacctctgaattttggttacctttcaatgatccgggcgcagcacagctgatgtatgcgcgcaacgtagcaaaagccgctaacatggatatgaccgaattcttcgatgcctggggattctttattccggttagtttcaagttgtatgcttacggaagcttttcatataccgtgacacaggatatgattaatcagacgctggcttatatgaaaacattttccactaaatgtccgcctattgaatacattgaagaccgaagatatcaggtaggagccaaaggcaatcaaaaaggtatatccgaagatggaggagatgtagggtacttcgaaacattccagaacaatgtgaaaatcaccaagactgtaagttataccgtttccggaagaacatacactgtgactaatggcgaacaggcggttgctttcgaattaatcaagggtggcaaaaaagtatggtttgccaatcggttcgtatttaccgtacctgccggagcagacattgaaggagcggaactgtacgctgttcaggcggacgggcaacgtattaaagcaaataaatagggaa

SEQ ID NO: 4685 - DNA, 3753 bp, Unknown
  gut microbiota DNA sequence
ctgaacacgtgtatcagctttttccgcaaagaaaagaatgtaccggaaatcgtcaccctcacccgcgaagcggactggatgatagaggaacatgacccgatccacgaaatgctgaggcaactttatcaaatgatcaatcagctgggacaactcgacaaatcaattatcctgctttatcttgaagacaaaagttacgaagatattgcggagatcaccggactgacggtgaccaatgtggctaccaaactgagccgtatcaaagacaaactaaaaaaaatgaaaaaggagtaatcatatatggaactggaagaactgaaaaaatcatggaatgccctggatgagcacttaaaagacaaggagctgatcaaagaggaagaacttggcaaactgataggacatgcagacaaaggtatccatgccattgcccggctgaatatcaaactaatcctgatttctttgccggtattggtcttattcctgctggaagtcctgttgcacggcagactgaatccgatctatatcattatcattctatcgtggattcccgcactctactgggacatcaccaccacccgttttctacaacagacgaaagtggacgaaatgcctctgatagaagtgatcagtcgtgtcaaccgcatccaccgatggatgattcgggaacgtctgattgctactgctttccttcttatactggcagtactctcatttatttattggcagatatggcaatatggaatagccatcattctgttttttatcctgctttggggagctgggctggggctgatcttgtggatttatcgcaagaaattcctgaaccgtattcaggaaatcaagaagaacctggacgaacttaaaatcatagacagttgaccagagtcagatgcttcgcatatttcaactaaaaatttaatatccgtgctgttatgttgcaacgcctatttatatttttacttattttccttattctaccagacatttatctgtatctcagatttatcgttcatctgacggcaaaacgctggctgagaatcctctactggctgcctgctttcctgttatccacaggattactttatctggtttacttctccaataacgcctttgccgaacgccatacacaggctattggatggttttccatctttttcttcctgtttacggctcctaaactattgctgtctctctgcacgattatcggggtacctttccacaaatggctacggtggccccgaactccctttatctgtaccgggctgacattagccgtgatttctatcgcaatgatcatctacgggtcttttatcggacgcacgcagtttgacgtcaaagaggtaacttattcctcgcccaagcttccatcggctttcgatggataccgtattgtccagttatcagatattcacatcggaagttggcagggaaatacttccgctattcagaagttagtaaaactggtgaatgagcaacaggccgatcttattgtctttaccggagatctggttaatcatcgtgcagtcgaactaaatgattttcaagatatactgtccggactgaaagccaaagatggagtctactccattttaggaaatcatgattacggcccttatttccgctggaaaagccagcaagagcaagacgataatctgaatgatctcctgcaaagacaagccgctatgggctggaagttattgaataattctcatacgattctgattcagggcagcgacagtatcgcccttattggagttgaaaacgaaggagaaccgcctttctcccaatatgctgacctccccgaagcgatgcggggaaccgaaggaatgttccagatacttttaagccataaccctacccactggagacgggaagtactcccacaaacagacatcgatttaatgctggcagggcatacccacgctatgcagttaaaattcgggaatcattctccttcctcttatatctatcccgaatggagcgggatgtatctggaagggacacgtggtttgtacgtaaatgaaggcatcggctatgtcggacttccttttcgcttcggtgcatggccggaaataacggtgcttaccctacgacggtaagcacgctttttccattgatcttcttatgtacctgcacctgaactgaaatacgttcactcatttcctgtacatgggaaatgacgccgattttccgtccctgcatctgtagctgctccaaagcttccatggctgttctcaggctgtcagcatccaacgagccgaatccttcgtcgataaacagggattctactttcaaattattgctcgaaagcgaagataagcccaatgcaagtgccagtgaaatcaagaaagattcacctcccgaaagcgaatataccgtacgtatctcgtcacacatatcgcaatcaatcacctgaagcgccagtgtatcgggaacttgctgtaacttataccgtttggaaagataagccagatgtttgttggcatgaagcaataacagatttaaagtataactttgggctatgactttaaatttagcaccgtcggcactaccaatcaatttattcaatttagcccaacgtacggcaactgcctgtttttcggtaagttctttggttatctgctcaaagattgttttattctttgcctgctgcaacagacgtgcctccgcagtcgacaacgtacgttccgtattaagattatcttcctgctgtttcgctatagcctgaggaagctgttccggaaattcaatacctttctgttgctcccgaagttcttcaatgacaacggacaactgtttcatttctccctgcaggccggaaagatggttttgtactccctccacttgtttacgagccttttccaacgcctcattcaattctttttctcttcgggcaacagcagcctcagcttcgtccgcactcttcccttttaataacaaagaacgttcctgtcggagtgcatccaacgctttagcgatcacttcgaatctttgttgctcatcaacagctgctttttgtaaaatagccgactgttctttagcggctgataccttttgcgcagccaaacgacactgcgagacattctcacgcagagcatcacagtgtgtccgcaatttctttattttctcatcgttctgctgccattccgcatacagatgctgataagctgaaatacgttccgccaactcatttaaccgattctgtatctgttcttcctctccagccggcaatccttcttgttgcaaaacggacaactgttcttttatctgtacctcagttgccctttgatgggttaagtctcgttgcaggacaatgctgcgattatttatctgctgataagcagacactgcggtattatattcctgttccatattccggtaaagagtatccactacctcttgttcccgatgataaggatgtgtcgtacttccacaaaccggacaagcctccccttcctgcaactgctgacgcaatgctttcacatcctttcctaccgccatacgggcattttcataaagccgctgcaaggctttaactacagcatcctgctctgccaactgctgtgtacaagcagtcacttccttttctagtttctctatatcctgcttcgcattcgattgttcttcagtcaatttctttatattctgcaagcgcgtcagttctttttgaattttaccctgttcatctaccaaagaaggataaccgaaagaatttaaccggccaaggcgttcttcattcacctttgtccatgtttc

SEQ ID NO: 4686 - DNA, 767 bp, Unknown
  gut microbiota DNA sequence
gctgattttagttctctctccgtcatagcgattttgccagtcgctgccagatctacctggatatttaatagctctttacatgcattgctgtattgggattgcgcgatttcttttcgaatagatggaaggcgctcaagtacataagctttatattcatctgcacttttcccgacaatgtcgttgtacatatccatgtaataaacgctttttaatacaatatctatatctactgaagctaattcttgttgtagactagccagataaccattgaagtatacaggctctccatacgttttatcttttctttgcagatgtgcttgtctgcggcaaagttcctttgtatttataatgagtgatgtctcttcattgggagctatcagacattcaatccaaccaaaaggaaattccaatgctacgcttgtaacagatgcaacctttacttccgccaggaaagtgccgtcctccttgatttttatgatattctgttcgttgtggatattcaatgcaggactttctatgtgcatcttcacttgctttatcatctctttttgatagtctagtatttttcctttaagggtagcagtaccatagactaacttaggagtcggcaatatcgcttttttatttattttgtgcacgactgcttctttgggaagtttctgtttatagaatgcgtccttatccagttgtatgccccatatcttatatgctccgtcaaaatccccttccgagaaatccagactggttacattttcgggtatgggagg

SEQ ID NO: 4687 - DNA, 834 bp, Unknown
  gut microbiota DNA sequence
catctagcatcttggttgctgtttacttgttgtttatatattatgttacttatctctatggcatttgatgcctttattcgtgtgttattttaccgacatcttcatcgttccacccgggtgaaccgatcggtgtacccttgtaaacaggtctgcgcacctaggtggacatgcttgttcacctgggtggaacgatgaagaactccctttgataatgcgacaataatagttgtaaagctggttattatagggttgtttgcatactattgaacggtaaaagaaatgtgcttaaaggtttttccgggaaagggaaagtatatcggtatgcaattatctggcggatatcggaaagcagaatgagataccctgttttcatgggtttgaattaaattaattccgccaacaggtatgttttagtgagaatgtagcggtattactagatagatatagaataaaattagtagctttgctgaataatttattgaacaaagctatgatagaagttatggagtccgctttacagaaagctgcgggcgaaggaatggatgaatttatccaggtatttactgataaatataaggaagtaatcggtggtgaattgactgctgacacaatgccgttgttgacaggtgaacagcattcattgctggcttatcagatttttcgtgatgaaataatgttcggcggattctgtcagttgattcagaacggttatggcggatatatctttgataatccttttgccaaggttatgcgtctgtggggggcggaagagttctctaaattggtatataaagccaagaagatatatgatgccaaccggaaggatctggaaaa

SEQ ID NO: 4688 - DNA, 1148 bp, Unknown
  gut microbiota DNA sequence
caactgcgttatactttcatcgaaccgcaaatcgctattgtttctccgatgaagaatcaagcagcccccatacatccggaaaccggctatcagcttccggtctcggtcaacacctataactcacaggcaaaaacatcgtctgtttcttatctgctgagcaatccggaagacaaccgggaaatagccaaaggtaacctgtcgcccctcaccgactggaactggagcggaaatattcaaatacctgctaacgaaaacggaaagaaactgaacctgacagtgacttcatccttcaacgacggaaaggaagcgactgccaccagccagttcctttatcagaaagatttcaaatcgactgctatcacagggaaggactggaataccctacttcagaacgcaagtcactccggcggaataaatgattcccaaatcaaactccccctgcaactacaatggacagcgaacacaggaagtaacatcttcatggcctcccccctcatcgtcggacaaaaagtattcattgccactaccgatgataacacgtcgctcaacacctatatttgtgcattcgacttccattccggcaaacagctatggaagttccgcacggaaaactcggtaaagaatacgattgcctgcgaaaatggaatcgttgtagcccaggatgcctcctgcaatctgtacgccctcgacgcagcatccggaaaaccactgtggcaacaatacatcaacttaaagaactatccctatctgaccgaaggactgacaattgacaaaggaatcgtttatgccggaatcggcgccggactttcagcctacgacctgaaaacaggaaaagtgatatggaccaacacggactggaaacaacgggaaggctcgaccaccacgttaaccatcgccggagacgtactaatcagtggcacccaatggggaggactgtatggcaacgacatccgcactggcaaacaactctggaaactctcggacaacggactcggcaaccgaggtgcctctccggtctacagagacggaaaattatggatcatctcctccaaaagctttttcctaatagaacctcaaaccggtaaagtactccagcaaaaggaactgtccgccaatctggacgtgacatctactccactcgtaaccga

SEQ ID NO: 4689 - DNA, 7852 bp, Unknown
  gut microbiota DNA sequence
tcatcagatgtatgaaagaagcatgcagggcttgacaaaccgttttttatgttgtatatttgtaagtgagaaccggaagtaaattcgataacattgataatatagacgaaaaatgagtaataataagtacaatataataacagattgcaagcgtttccacttcggatagtgcttgccggatagtctgatacaagctaagggctgcgattctttatgggaattgcagccctttttgttgcttaaaattaatatttgttgctgaaataacgatgctcgggtttataataaacttgggggacgtttataataaacgatgaaagaatttattaataaatgattctgaagaagtatataaacggttaatatatttcgtgtgaaagtgtgtaatgatgccaagaaactttctgtttttattattaatgggtagtttgtctttacattctcttttttctgttttcctgtcatcagcaggatgtgtcacgatgtaatgacgagaatgatattccaaacttaatttttattttcgctttattaactattaatgaaaaaaaagtcttttctttgtatcatcttaaaaatgaaactatgagaatcaatttatgtttgttattattccttgttttgctgaacatctcttgtaattccaaacgggcgggaaaaaaagaagatgttgaaaaagatacttatgccaatccattatttatggaaggggctaattcaagcgcgatttaccataatggtaaatattattatacccatgaaactaatgagcaaatatatctgtgggtaaccaccgatattaccgatatggctcattccacttgtaaagaggtctgggtgcctaaagatccttcgaatagccataacctttggaatccggaaatacggaatatcaatggtaaatggtatatctattttgctgccgatgatggaaatacagataatcatcagatttatgtgattgagaatgattctcctgaccctatgcagggagagtttcgcatgaaaggagcgatcatgaccaatcccgattggaactggggaatacatccctcaacttttgaacataaaggggagctttatcttctatggtccgggtggcctaatcggaggataggcagtgaaacacaatgcatctatattgcccgcatggaaaacccctggacattggctacggaaagggttctgatttcgaagccggagtatgaatgggaacggcagtgggtaaatccggatggcgggcggactgcttatccgatttatgtaaatgaaagccctcagtattttcattccaaagataaccggactgtcattgtctattatgcggcaagcggttgctggtctccttattattgtaccggaatgttgactgccgacgcggatagtgacttgctgaatccggcttcctggaagaagagccccgttcctgtatttcaacagagaccggaagatggagtgtatggcccggctaacctttcctttcttccttcgcctgatggaacggaatggtatatattgtatcaggcaagaagtgttcctagcggtaatacgggagagtcggaaagtcgcaatccacgattgcagaagataggatgggatgctgatggaatgccggatttgggagtccctttaccggtgaatactccgttacctaaaccatctggcacagttccgtttactccttgagttagaataaatgataagagggtgtccgaagacaccctcataaataaaactgaaatatagttctatttaagtctaaatacttccgaataaattccttgatcagaccctttgggccacaggcaaatacgtccaaacaatgttcctctttttaaagctgtttggaacatactgttattagtataatctttggtagtaaaactatatatcttacctgtttcgtcgtattgtgctaaattttcagtttcgtcataacgatctacattatgttcagcatcactcaagaattgtgtggtacttaataacataatcatacgatcaattccagtacctgctattttatttactttaaatgaagcatcaactttattaccattcagagctattttagcatcttctattaagtaataaggagttacttcaacatcttgtgtggcaagtccatttaattttatctctatagtatcgcgtccctcatcactccaaggtccattgccagccttcgttattaattgatattgtccatcaaagatacagatagagaactctccatcttggtttacaaaaacctctacaggatcatgtttttgatagccacgttggtatagctgcaatttgactgcttcgttgccacgtaattgtaaagcctctcctttatagaccacacggccttttataaaggaggtaggttcgtcataattatctttgctgcagcttattaatgcaaaaatggataatatgactattgaatatattttaaatgttgttttcatcttcattgtttcttattaagttactgataaggattcttcactaactttggattattattaatccagccgttatcaatttctgaataatattgtgcttctgtacattttaacggacggcgccataaatctaacttttgcatatctttttcaataaatacccacttgccatcgttaggatcacctgaagcaaccactttgaatggccatagtcctaagcgttgtgaagttcttgctgttggttcaccagtccatattttgcttgcctccatccagcgtttcagatcccaccatcgattaccttcaaatgcaaattctactcggtattcatgcatgattttctcatgatcaattgtatttaatgacgagattccagcccgattacgaacggcattaatatacttcagtgcatctgtatcagtattatcccgtgatagctcccagctagcttcagaggcaattagataagcctctgctatacggaaataaacattccacatttcggaaccacgtccaatagtacctgctgaaggtgtagcatccaaatatttgcgcacgtagaaaccggtacggtttatttctcggtcattaccgccgaaaggaccattattagctgtaatcaatctgccatcctcgtcataagaattacgggctccagtcacttcagaccatgaaccattttcttttcgcagttgcccagcttgtaattcaataaccttactgtcaaaagttgctccaggtacaatgatagaacccattaggcgtgggtcacgttccatgaatagttctgttggttcggtaaagaatttcggattttcaagggtaccaatttcaaatggtatactcgtccctttttgttcttccgtggcatcaagtggttcgaaagcctcaactagatttagtaaaacagataaacggtcacttccagtatcttgttctatacttttgggcaggtttcctttagtgaactgatgtgtttgccccggagagacataatcacgacaccaaatgacttctgtattaccatctttttggcatacagctttatagaaattgtccgcatatgctttgtgagtttgctctgatgccagcatgagcttgtaaggtccattttctataacatcttttgcagcggccaacgctattttatagtattcttgggctttggaaaaaggtatacctacttctccaccattcgtgcgcaactgcggatgtgcctcggccgtgttataagtagctaatgaagctgcagttaaagcagcacgggcttccagcatttttgctacccaataattggctcgtgcagagtttttgttagtgtctttggtcaacattttggaggcttcctgacattctgagattacataatcgtataaatcagcctcagtagaacggggtatctgcagagttgttatatccattcctggagtgtaattgaatatctcatcatttattataggtacaccacctaaagtacgtcccatacaaaaataaagccatgcacgaatatagcgtacttcacctatataagcagttttcgtggcttcatctacagcgtctgagggtttaataccttctaagaactgattaaggtcatgtactagagtatagtcatatgtacgccatttgtttctatcaatattctcatcgctatttgtgtcgaaatgaattacctcgtctagcattgtccattgatcccagtcatcaatacgctgtcctattgttacacgtccataaaaattggccaatacggatttaactaatgtagggtctccaaaagtctgatcttgggttaataacgtatcgggctttgtatccaagaagccactacaactgcccaatgacaacatcgtggcagtcattattgtatataaatatttctttttcattgtttcttaaaattttaggtttacgccaatgtttattactcgcatcggagggtaatccaaaccgttgtcagatgcacattccggatccatcacagacaaattggataaagtcagtaagtttgtgcctgaaacaaacagtcttaaattactaatgccagttctgtttaaccatgttttggggaatgtgtagccgacttccaaattacgtaactttaaataagttacattatgtaaccaatatgaacttttatcataagcactagtttcatcagtatttagacgaaccatggggtatttacctggaattaacggactattagcatcccatatatcagataaatgccatgcatccttcaatacttcatcaggactgttaccatcgttttggaacggacgggctgtctcataacattgattccatgatgtcataccggagccggtccaatccattgccaaatcaaatcctttccatgatgcagaaagattaataccaaaattgagagtaggagtactatctacacgatacccaatgggacgttcatccaaataattgatcactccatcattgttttgatccttatacatgatatctcctggaactactgtacgattcccttttctatcattatcaactggataattggcaatttgctcccaactatcaaaacgaccgatagcttcatacccccaattcacatatcctacacgatgccaaatgctgttacggtattcatcccacgaattactaaagcgcggcttatattgttcccaatcccaaaagcgggaataggttatattacccccaacactataattgaaatcattgatttgatcagtccacataatagaagcatcaaaacctctatgcatatctgatttaagattctcctttggtagactaaaacctgcttcgttcggtattaacacatcataacgaggttcaggaattccatcacgtacacgacggaaataatcaaattgtatattcaaacggttattgagaaaacctaaatctacgccaatatctagaatctttgctgtcatccaggatagtgtttggttaggtagtccccgagttgaagttcctactacccagttgccatcaattactgcacccccactgttgtaattatagccaggtagatagtcaaaagcagaatagtcagaaacagcatcatcaccaacttcgccatatgaaccacgtaactttaaattagtaacgatctcaccaattttgctctctttccaaaagttctcttcagaaacacgccagcctaaagaggctgatgggaaaaagccccaacgattatccggacggaatttccatgatccatcccaacgagctattaattcaactaggtatttgtcagcataactataattgatacgtcccaaatatcccatacgtgcctctgttctatttccatcatcattaaactcctgaatttctttcagacgaatcaaatccattgcattagaaactggtgtagaatgaatccacattttagggcgtttacgctgacttgcctcaaatccagctacagcaacaaccgcatgtttaccaaatttgcggtcaaagtttaactgaaagtttgaaaattgatcttctaccttctcgcggttgcgctcacgataaggatttgacatacggttggttacatagtaattatctttttgttcgtcataaccatatagttcataggtgaattcttggttatccagttcgttataagcataatagtagcctagcattcctttgaattttaatcctttcagaatctcatattcagcagtaccattcatttgaattacgcgccatacatctgatacctttcctgtagtctcgtaattcaaaatagcaaagtttgtttccggttggtcggatactagctgtggataattcgggttatcattagcaaatggtcgtttagttggttgatttttcattgttgcgaaacgaggcagccatgtatcatcagctcccggtactccaggatggcgacgatcttcaatgcgtccattcatacttgcccccaccttgagacgttcatttacattcatttcgatattcatctgtacatttgtacgacgaaatccaccgtaattgcggatagttgcatcttgattaatgtgggatactgctacataatagtttgctttatctgtacctccggagaaattagtattaatataatactgcggagcacttacccaaatatagtcttcccagtcccagccttgatatttaggttctgtaccactcatccatttctcgtattcttctttgctgtaacgacgagaatcaccattacgtccagagaatgtttctgctgttacataggcatgaacataatcctttacattagctggactaacatatttggagtttttctgccaaccataataagcattaacagaaactgtatttttagaattacgactacctttcttagttgtaacaaccactactccattcgccgcgcgtaccccatataaagcagctgatgcatcttttagtacagatatagattcaatatcattaaaatccatctgactaaattgccctgtatctgaaataacaccatcaattacaaataatggagtacccatgttacgaatttgcaaagctgtttcagcaccaggacgtccatcttgttgacgggtatttacacctgcgattttaccaaccagagctccacctgcagtaactgcagaggaacgagcaatttcttcagatttaattgaagaaacagcgcctgtcaatgtcgctttcttttgtgacataccaaaccctgttataacaacttcatctaaaacttgtgtatcttcctgtaaggttatagtaatttgtcttgcctctcccacagtaatattctgtgtttgataaccgataaaagaaatttctaatattgtttttggggctacatttagagaaaattcaccgtttatatcagtgattgtaccagtacttccccctgcttcttttacattgactcctattaatggctcaccgttggcatcaataacagtaccttttacaatacgttgttgttgggtagagtttactattaatgtattttcatctattatactggcagcatgagtatagctaccaggtaataatgaaaatgcagccagacagagtgggatacaccacatcttgttatggcttaaaaaccaaaatacttgttcttcacttttcatagcaaattaattttatcacctgtattatactttagagaataagtacaatacagatggatgtttaaaatatgttgagttatttcacattctatttaattgtatcaactttgaacgattatttattttattgtttgttctgtactttatctattaatactttcatccagtatcctccaatcactgaacgcgctttaaaacctgtcattttacctgtcttggtttcatgccaatcgctgatgggcacacgtgaagtcgtttcattgatatatttataaagaggaattatgaacttctcgaaagtatctt

SEQ ID NO: 4690 - DNA, 9467 bp, Unknown
  gut microbiota DNA sequence
aagtagctccggcataatatgtagcacgttcacttccaccggtaacattcagtgtatgtgtctgttggaaagccgatttccagcctgctttatccagccaatcataattcaggttatccatctcagccaattccatatcactatacagcacgtcgaggtcatcataaccactcgctttattggaacctatcgccaaagcattatagaaacgtccataagcagaacctttcagcaccttggaatgactaacggcatcattcacggcaaatttacctgaataggaaataacaggtactccttttttccctcttttggtctttacaagaattgcaccattggcagcacgagaaccgtaaatcgctgcgctggcatcacgtaacacagttatactttctacttccgaagggtccagcatattaaactgctccatactcggctgtccattcgttcctaactgaatgacatcatcaataataatcaaaggggtggaattaccgccatccttggatattccggtgaaagtccggttctgacggatataaacctcattggcattcgtacccggacggctggagcctaactgtacattcaagccattcaccattccctgcaaggcttccgaaagattggataccggaagatcttccagttcttcagcagaaatagtcgatacggaaccggtaatgtttttctgtttcatactaccgtaacctactacgactacttcatcaagtttctggttatcttcctgaagaatgactttcaaagtatcgcctttcggcaggattacttgtttcagatatccgatataagatattaccacctttttcccatccggcacattcagcgaaaagtgaccgtcaatatcagtaatagtacctgtcgtagcatcctgtaaccgtatagtagctccgataatcggctggccactttcgtccactatctgtcctgtaacctttcgggtctgtgcattggctgacagcgcaaatgctacgaaacacaatagcacgcctacctttttaatgaatgaagatctcttgaacttcataaatacaatgtgtttattcatattatatatattatttaatgcgcggttcatcgtctccattttgaagcacctacgctggaacaacctgtgaataactcgttcaatttaaaattgttagtccccggagcagtgaacagagtggcagttgacattttagaatcactcagtccgaggtttcctttgcttgaggtacgatcattagcctgaaaactattaaccgaactgaaaggatatacgccggtataatcatcctgtcctccggaccccagttcattaaatttcggaagttttccgtctattttcatggaaccgccaaatacacaattttcaatcttgacagcaatactcggatctacccggaataagaaggagttttccatcggcgcataacagaatgtagtatttgtaatcgaaatactctttccgctgctactattccgcaaatctgcaataccgcaaatattagtgatagtacactcatcaaaagagacatcattgatgtaatttccatttttgccatcagtcgaaactataccctgattaccgattgcgttaatggtacattctttgaaagcaatagctcctacatttccggtagccttttttgaacggacaatagaacggaaattctcaatatagcaattagtgaaatcaatcgtgttaatcagaaaaacatcggactccggacaaatcacttgtttaccactcaaactgttatcagcaacctcacttaatgatttggaagccctaagattgatgcgtttaaaagtaaccttgtctacaactccgccttctactatacggaaagcgttatcaaaactaaatgtcggataatcttccaacgtttgcggagtaacaaaatgaactgaatgtgcaaactcaataacagtttctccactattcaacacgtacgtcttacctgccggaagcacaaaggttgtaccttctgccagagagttccagtcaagtttattaaaataatcaggatcaaatgcttcgttacgcaaatctatccggtttgccgtcccataatcttcatccagattttcggttacagctgtctttacttctatgcgtgcctgataagtatccgaactctgttcatcacccgaataaaaactaacacgataagaagtctccggagttaaatcatctataattttggagccggccagatattcttcggaagaaacgttataaacctttatatcttgagaattaacagtctccagccccatcggaacagcagtcagagctgtaatcacaacagtatcattaggcgtccacgaaataagagcctgtgtatctatagtacgagcttctcctaactctatcgacaaagggcggtaaagaacacctgtcacctctgtttcccaataaccggacagccttccgttaccttcacatttcaccttaaacttgtagttttcttcccagtctaaatctatcacacaggaagaacggtcacccggcacggtctccgtcttataaagttcttcccctttatccaccaccttatacacctcaacgatatattcggtcgctccttctacgcttttccaactaagatatgccttgttttgcactatctccatagcagtaaccggtcgtaacaatacttttgagccggcatcatcatcgtccgaacagcttgtcatcagtcctgaaaaacaacttaacaggcaccctactgtcattaatttcaataaattcatagcattctattttaatattaacactgatttcacttcttaaagttgtaggaaatactttcacctaccagactattaagatatacttccaaagctgtataaccaacctctgttgtcctgttacggtcttccggattagcagggtccaaaccaacctttttctcccaggcatcatccatgccatcctgatccgcatccgtaatggttccgctggttttatacgtcagtccatccagaccttcagcctcatccgggctatttattatgcccgggatagcaccactattggcgtctccggctcctgtataagtacaaagtccgctcttcacttcttttacaatacgcgcatctactttatcacggggaaatgcgccggcaccacttttatcagccaacacagattgataagctttctccgcagattcatattggtcagataaagtgtatgattcccagtcgaaccaatattgttcataattctctttccctgaaggaataatgaaagaagaagctttcatctcatcgatagaataaggataattaccatccgtatatacaccttcccaattgtcggaagtcagttgagaattaccctccattacattaccatgaaagtaccactttgaaacggcacgcaaaggtgccttattgggttcacgggcgcttgattgccggaagaatttcagttcttttacccgggctgtcgtagcgggccccggtttataataattattcacaaagttacatgaccatccatgatgttccggatcctgagactcgtccatacctccataagtagccatttggctaccccaattataattcacattattaatatattccatataaacaacgatatcctgtccaggatccttcccccgtgcgccattcatcaatggtgtccggctattacaatgagcaaacagattatggtgataagtagatgaagttcctccccacgcaccaccataagcacgtgcaccttttttattgaccgaataataaagcccctcgctggaaatgcaccattgcactgtagaaaaatgagtatcaataaaatcggtattctcttcactagcccagctgaaggaacagtggtcaattataaagttattcgcattttccacccgcagacaagcagcattatgttcctttccactcgcatctttttcaccgacacgaaaacgcatatgccgaataataaagttctccgaaccaccaaaatttatttcattctttatgatacaaacaccatcaccgggagctgtttgtccagccagcgtgaagttcttagctttgcaacggatttccgactttaattctattttgcccgaaactgcaaaaacaacagtagttgcttcgttttgtgagcattgctgcaatgcccatctaaaagagccctctccgtcatcgttggtattggtcactataacgacttttcctccacgacctcccgtagcatttttaccgaagccttcagctgtagggaaagcctttaatacctccggtcctttcgcatagggacctaactccatattagtaaaccctttgacatcggtacacgcccctaaaaataaaaaacaagcacaaaaaggatattgtaccaggtaacgtctgaaaaagactggagttaccacaaacgtcgttctaataagcacaggaaagcgttgataccaggatttccatttcttaataaatgcacaatttttcattcatttcaatttaaagttaatacatattactatctaatcaatacttatattacatgcaaatcaatcgttgaaaacatggggaaaattgaaacaggaattatcttatgtttattcattaatattcctggtttatagttcttattttttgtttcatatgtgcaaaagaagttatataaaacataaagcgaggggactttttgagcgtttaggtgcactattttatcactaaaatatcagatacgagattttgggattaaaataccaaaaattccatattttactttacatagtaatttcgactagtcattttcagtatttgcttggattagaataaaagtgtccatcaggcgactagcattcattactctaaatgctagccgcctgatggacactcaaattttagctgataacgaacgaaaatgaatcatccgttgatcaaatagctatttcttatagtcctaaacgttcttttaataacctgtaacccgaaaggcttacccgaagtttaaccccatttttcaataatagctggtacgtttccttcccaaacaattctacacgggagatttgagtgacattgacaatcgttgagcgatggacacgaacaaaggtatcggaaggcaaatgagtctcaaaatacttcatcgtctgttccttcagatattcccccgaaggagtaatcagcataacgtagtctccgcatgcttgtatgtagattaattcatccgttttaatcaaatgaattttcgaaccgtctttcactgtgatacggtcgatctgctctatctgcggttcttccggcaggctaaccggttgatgcattatcaattctttttccagttcctgattcagtgcatcttctttagcgacaatcaaacgataccaaagaagaatggcaacccaggtcggaatgccaaacaacaaacgaaaagggatggtagatgcaaaagtgatatagggtataccggctatccttgttacaatatcgtaaaccataaagctgccggctatccagatcagtattcctgccaccagagtaatgacttccgtctgaaagatagagactactccgacaacaaaccagaccaaataacctaatgccatcaaccaaccgattgtcgctattccgtctatgacagcaggcacatagtccgcacctgtgtatacactcattatcattacctgagctaacaccagaaccagcgctaccaccaataccggcacccaacgataaagataatctataatcggatgtgttttcatacgttagtctttaacttccagtccgccaaaagaaagccttccccgaatgactaatacactttccttgttaatattcccgttttgccagcgtttgtcatcacaaccgccaaagaaagcattgcacttaaatactactttccagtcagaagggacatatatttcgatgcctccccaactgcaatccaaatcgatgtatgtttctcccggtgcgatatgagtatggcgcaggtcaatcgttgttcctccacaagaggtacggacgactgctcctttaaaaagttcatcaagcacaacatgacgtgcagctccaaaagtgttatcagaacgcagaaagccatcttccgattcactttgctgctgattgttggcaaagttcatgcccgcatgaccataatgtccatgtttcatccattctctatggtcacgaaacatacgctgtttatcattccatggtcctctgtgtccggatttaaaaagaaataaaactccggctatgatcaaagctaagggccagaccattgcctgagaattctcaggcagccatgaaagacttcctagcaaaaaataaacacctaccaatacaaggataattccaccaacaaaatgacggcgtatcatcgaataaattcccattataataaaaagagaataccatgatactattatactaaataattcagcagtaatccaacccatattgcgggcgaacaacaaaatccctgaaaggataaataatgaagctaccaaaagttttcctgaaaaacctgtaggagatgagaatttagatttctgttccatcgtttctatgattaatgattgatggttcaaagatacatcatttctttgtgctcttacaggcttttcagatgatttccggtcagtaaaccgatgaataccggataaaaatcggtgaatgggacagagtaaagcgcaataaattatgctctaattgaatctaataacaaaaaatacaatgtgaaaaacaaatattgcacaccgacgtcttttcttccctatacatttgcaaccatataattaacacaatacgtgagtacaaccaatattttaaagaactaatgccatgaataaaacttttttaggagcttttcttgcatctgtcttcatatcattcacagcctgttcggaagaaaatctcgaacaggacacaaatcctccaacagaacagccgggagattctactgatccggatgattcgggagaggatcagctgccggagtatccgactcccgaccgttcgacagtcgcagcttttcccggtgccgaaggagccggaaaactaactagtggtggagccggaggaacagtatatacagtaacttctctcaaagatgacggttcagaaggtactctccgttgggcgatagagaagtcgggcaaaaggacgattgtattcgctgttggtggagtcatccctttaagcaaacagctgcaaataaagaatgatgatataaccatcgcaggtcaaacagctccccaccccggtatttgcctgaaaaattacactttacgtgtcaacgcaaacaatgtcattatccgatttatccgttcacgcatgggggatgaatgtaagacggaagatgattcgatgaatgggtatcaagattcttatcccggcaaaaggaatattattatcgaccattgctcaatgagctggagtacggacgaatgtgcttcattttatggaaataccgactttaccatgcaatggtgtatcatcagcgagagtctgacaaattctcttcataacaaaggaggacatggatatggcggaatatggggaggcagccctgcaaccttccaccataatctgctggctcaccatagtaaccgcacgccccgcctctgcggaagtcgctactccaacagagaggatatggaaaaagtcgatttatgcaataatgtaatctataattggactggcgaaggggcctatgcgggagagggaggttcttataatatcatgaataactattataaaccgggacctgttaatgccgtagcgaaagtacattgccgtattttcaccgcttatctggatgatggcaagaatcaacaggcaaaaggagtatatggaaaattctatgtaaacgggaattatttcgaaacacatgagaagttatctaattcacaaaagacagaattggccaatgcaaatgcagataatacctcctcaaccgctttttgcgtaaaaaacaacgaagtttcaacaaaagatttgcttgtatctttacgttttcctatcttagatgattattcgttcgttcagtctgcacaagatgcctatcagtctgtattactatacgctggtgcttccaatctgcgtgacaagattgataaacgtattgtaaaagaaacccaggaaggcactttcacatacacaggctcaaacggaggaacgaacggactgatcgatacacaagctgatgtggaaggatggagtgaatacgcatccactaccactacacagcaggatagtgacaaagacgggataccggacgaatgggaaacagccaacgggctgaatcccaacgacggcagtgacggaaacaaatataacttaagcaaggaatataccaacctcgaagtctatctgaatagtttggtaaattccttatacccaaccaataactaagtagctatgaacaaaaaaatcctggtagggctatgtgccttatttatgctcccttctatccaagggaatacaaatactgacaattcgtacaaagagaatgctactcccgaccgttcaaaagttccggctttcccaggcgccgacggtgcagggaaatatacaacaggaggtgccggtggaacagtatacactgtaacttcactggcagatgacggttcggaaggaactttccgctgggctatcaacaaaaaaggcccccgtacaatcgttttcgcagtcagcggcatcattgaattgcagaagcctttaaaactcagcaatggagatgtgacaatcgcaggtcaaacagctcccggagatggcatctgtctgaagaactacaccttttccattcaagcagacaatgtgattgtccgctttatccgttcacgtatgggagcggacatcaagcaaaaaggtgacgatgcaatgaacggtaccaaaggaaacagtaacataatcatagaccattgctctctgagctggtgtacggatgaatgtgccactttctatgataacagtcaattcacccttcagtggtgtatcatcagcgaaagcctcgccaactctattcatgagaaaggagcacatggctatggtggcatctggggtggacaaaaagcatccttccatcataatctgctggcacatcacaccaatcgtactccacgactctgcggcagccgttataccggcaaaccggaagaagaaaaggtggaattattcaataatgtaatctacaattatggtagtgacggggcttatgccggtgaaggcggttcgtacaactttctcaataattactataagccggggccctatagtgctaccaaaggttcataccgacgcctgttcaccgcttatgcagacgacggcaaaaatcaaaatgaggcaggggtacatggaatcttccacttcaaaggaaactttatggacgccacctgtcccagcctgactgacaagcagaaagaagctctttataaagtcaatatggataatacatttggtctgatcgtcaagaacgacttcgcaccggaaaa

SEQ ID NO: 4691 - DNA, 624 bp, Unknown
  gut microbiota DNA sequence
atcgtagaagaaacccgcaaagggaattacacttatgaagggtctcatggaagcaccaacggaatggttgaccaaccgatagatgtaggaggctggcccgaatataaatccgaaccgaccccaaccgactccgacggagatggcataccggacgaatgggagaaaaagtacaatctgaatccgaatgatccaagcgacggcgcacaatatggtttgagtaaagaatacaccaatctggaggtatatctgaacgagctagtgaatcatctgtatcctgcggattctaaaaaataaaactaaaagcccgaataaacagttataaaagattaagacgagagtacattttcccataaatcctcgtctttatccattttatgccggaaaaacaaaaaatactatcgtaaaaacaaatattacacatcccacaagccccaaaaacataattttgcaccagtgagaactctaagagtggacacactcgaatattaataatctaatataaaagaacaaaagatgcctaaaggaatgaaaaacatgcgcactttgctgctaatgattttcgcagcattatcgctcagcgtatcagcgcagactattaccttaaatggtaatgtgaaagacaca

SEQ ID NO: 4692 - DNA, 6508 bp, Unknown
  gut microbiota DNA sequence
ttatggtactgccaagcgtaaagacataacaggatcagtagccacagttaatgctgaagcattgacagtagtacctgttgcatccgcaacggaagcactaacaggtaagatggcaggtgtacaaattaccacaacagaaggttcgcctgatgcagaaatgaagattcgtgtacgcggtggtggttctattacgggagataacactcctttatttattgtagacggcttccccgtagaatctatttctgatattcccgcttcagatattgaagatatgacagttctgaaggatgcatcttctactgctatctatggttctcgtggtgctaatggagtcatccttgttacaacaaaaagtggtaaggaaggtaagatttctgtgaattataacgcttactactcttggaaaaagatggccaaacagttaaacacgctttcatccggagactatgcaaaatggcaatatgaattggctatgttgaatagtggtaaacatgatacgatcaatccagatgattataccaaagtttttggtaactatcaggatatagatctttatgaaaatattgaaggtaacaattggcaagatcaagtatttgggcgtaccggacatactttcaatcacaatttaagcatcaatggaggaagtgacaaaacaaagttcgctttcagctatgcacatatggatgataaagcgatcatgcaagattctgattttaagcgtgataacttaagtttaaaagtaaatcacaagcccaataaacgtgttgctttagacttctctgtacgttactccaatacaacaatcaatggtgcaggtgctaacgagtccaaaagcgaagtttccagtgcagactctcgtatgaaagacgttatgatttataccccgttcaatttcaaagatttgagcgatgggtatgatcctgatctccaattaacaaatccattagtttccgttgcggacaatgcacgtcagcagtcacgtcaaacttttaattataacggtagttttacttgggagtttattgacaacttaaaattcaagactgaatttggtttagatcattactataataaagacaaacgtttttatggagttacaacttacaactcccgcatcaatggaaacaatcagcctattgccgtattcacttccaaagaaagaaaaaccttccgtaatactaatactttaaattacgatttcaagaagatactaaagaacaaagatcatagtttaagtcttttggttggtcaggaattgattaaggtgaaaagtaatacggatacagatgaagttcgtttttatccaaaactatttacggcagaccaagctttcaacttatcaagtcaaggcacagctttctcaactgacaaattctataatgctgacgatatcctgctatcctattttgcacgtgcaaactatgatttccaaggtaaatatcttgcgagtgcaacattccgtgccgatggctcttctaaattttcaaaagacaaccgttggggattcttcccttccgcagctcttgcatggcgtatgtcatctgaaaacttcatggaaagtactaaatcatggttagatgatttaaaacttcgtattagttatggtacagctggcaataacaacattccaagtgaccaaacaagtactatttggtctgctggttccggtgcttcaataggctggatgaataatatgtcaagttattggactactggtgcacaaatggccaatcctgatttgaaatgggaaacaacccatactcgcaatgccggtttagattttactcttttaaacggaaagttaagtggtacagttgaatattattggaatactacaaaagatttgctaatcaacttccccgtttccggtgttggatatagcttccaatacagaaatttaggcgaaacagaaaacaaaggttgggaagtaaccctaaattggaatgccatcaataaaaagaattatgctttgagttttaatgcaaacgtaggattcaataagaataaagttaaatccttaggtagcttaatggactattctgctgattcaggttgggcatcaacagatattcaatcagacttcaaagtacaaccaggacattctgtcggagaaatttacggttttgtaagtgacggacgttatgaagtcagtgacttcgaaggtttcattgatggtaaatgggtattgaaagctggcgtagcagatgcttctgacatcatcggtgagaaatatctccgtccaggtgctatgaaactaaaaaacgtagatggaagtgaagataataaagtgactaaagacgaccaaaaagtaattggtgatactaatccattctgtagtggtggtttctctgttaatgcccgtgtttacggattcgatctgactgcaaactttacctatagtattggtaatgatatctataatgcaaacaaaattgaatatacatcttcaagcaaatataaataccgtaacatgattgatgtcatggcagaagagaaacgttggactaacctaaatgccgacggaactatctgtaatgatcctacacaattggcggcaatgaatgcaaatacctcaatgtggtctccatggacacagaaatatgtgttgacagactgggctgtagaagatggatcattccttcgcctagctactctttccattggctacacactgccacaaactctgaccagaaaagttggaatacagaatctccgtttttatgcaaccggctataacttattctgcattaccaactacagcggtttcgatcctgaagtatctacacgtactaaaagcgcattgaccccaggtgttgattattcagcatatccaaagagccgtcaatatgtaattggtttaaacttaacattctaaaaaaagactaatatgaaaaaattattatatacagtaatagcagcaatgccattctgcggaagttctttacttatgacttcttgtgatgacttgtttgatacaaagtctccttcatctatggacgactccaatatattttcaatctatgatttagcagaaggaacaattaaaaacatatatatatattatggcgaacagaactatcgtgctcgttatttgccttggtatggttataatactgacatagaatggtatagtagttctgaacaggtaggtgacggaaaagcagatttagcggtttataaggtttcttcgaataatagtcagatgaatctcgctgatggtaaagaaccatggtctaatatttatcaaggcattgaaaaggctaaccttgccatccaaggacttagaacatacgcagatttgacagataaaaatatggcacacctttatggtgaggctcttaccatgcgtgctatggcatatgttgatctgattaacgcttggggagatgttcccgctcgctttgaaccaacaaccacagaaacaatgtatgctgcaagaactgacaaagacgttatctacaaacaactgataaaagatttacaggaagcagaaaatatggtagcatggcccaacgaaatggatgcaactactactgtagaacgaatcaacaaagcttttgtaaaaggattattagcacgagtttgccttcaggcatccggttattctttgagatccgatggtaacagttcattaagcagtgatccagaactagcaaaatctgtattataccctatcgccctgcaggcatgtaaagacgtaatggcagaagaaggaaaatatgtggctttaaaaacaaatttcgaagatatttttattgataactgtcgtgatattattaaagcaggtagtgaatcattatgggaaataccatacaacaatgaaccgactgcacgtggacgccaagtatatactttcggtttaagacatgagaccgctgatgtcatagtaaactacaaacaatccggtggacaggcaggtcctactcctttctttttctttgattattcccaaaaggataaacgacgtgatgtaacatgtgttccttacaaatggaacaaaggagtccaagaactcaattcaatagataaatggtatttcggaaaactccgttatgaatggatgaaccgctatattgaaagcaccgacgatggtatcaataaacaatatatgcgttatgctgatatcgtattgatgagagcagaattagaaaacgaattaaatggtccggcctcagcagctccatatttgaaacagattcgccaacgtgcgtttgatcaagccgattggaatacagaagtagaccaatatgtcgcagctgttcaaggtaataaagatgcaatgtttgatgcaatcgttcaagaacgcgctttggaattttgcggtgaatttgttcgcaaagctgacttgatccgttggaatctattaaaaaccaaacttgatgaggctaaagctaaaatgtatcgtttacgtgatttgcaaggagaatatgctgaattaagcgggcatttatattataaaatggaagattacacatggacgcgcaacggagcatcaaatacaatcgaagatggcagtctcgtaacatacggtctgaaccgcgatgagcaaaatatcaatccggcaggttacacagaatacaccaacagttcgggtgaaacgaaaacatggatatcttccagccaactaaaagacgagaagatagaagctatttatgcacaagacccggttaaatatatgtattggcctatcttccaggttaatcttaatgccaatccggaattgaaaaattattcctggtataattaattcatacacttaaatattgataagatgaaaaaatatataatcacagcatttgcttttatcacactgttgacaggcagcgttacattcactgcatgtgaagatatagatgacataaaagaattaaatttagatcgtctattatccccgactaatctgaccgcaagagttagagacaaagtaaatatagaattaacatgggatgaaatggatagagcccaatcctatgtaatcgaagtatttaaagaagatcctgattttacaggaactgctatttctacgttagaatctgaaaaagcaacttatacggttacaggattagaaggagaaacatcatactccatccgggtaaaaagtgtagcagaaggaattactgattccaaatgggttagcgctacccgttcaacagatgcagaacaaattcttctggaagttgcagaagaagatctgacagcatcagaagtaacacttcgctggcccgccggacaagttgctacggaaatcatcataactccaaatgatgttgcagcacaccgtgtgacttctgatgaaattgcagccggtgccgctactattaaaaacttaaagtctgaaactacttatactgcaactttaaagaatggtgataaaactcgtggtacgatggtattcacaactctcataaacttggatggagcattacctgcttatccgggtgacaatcttgcaacaatcatagcaacagccgaggctaatgctactattgtcctattacctaaagacgacaataatagcttcatatatacagatgaaagtggaactgcaaaaacattggaaatagaattaaccaaagatgttactataaaaggtttatatgcagaaaaccgtccaactactaatatcaagtttgtattaagtggatgtaacaatttcaaaatagagaaccttaatttaactgctagtgacggaggtacaattattacagtacttgatagtaaaggtggaaatataactgttacaaattgtgatgtaactggatttggttcgttgttagtagagaatgataatacacaaactggtactatcaatacatttactgtagataactgtattttccatgatatggcaagtggcaaaagatttgtagactatcaaaagaagaaatcctttatagcagagtttacattgaaaaattccacattctataattgttgctctggttctgattttattcgttttgacagacattcaacgaaaggcaatatcataaatatatcgaattgcactctgtatggaattgaagcaacaagtaaaggtctcttctatgtccgttccaactcagttggtaataaagattttactgcaaatatcacaaaatgcatttttgctaacatgagtaataaagtattctttagtcaagatactaaaactgataatctgacatttaactcgaactattatttcgaggcaccttccttactatcaatacctgaaggtggagccggtaaagtggtagacgcaactggagtcactcttgatccaggctttacagatgcagcaaacggtaatttcaaagtatctaaccaaacaatcatagataatgaaattggtgatccacgctggagaaaataagattttataaaatctagttaagctaaaagaggctaaaatcaaataatattttagtctcttttctcaagatagcgatactcgtattcgggcatcgctatcttttttattattattccaaagaagtgtaatcccccgataaagtacccgtat

SEQ ID NO: 4693 - DNA, 4318 bp, Unknown
  gut microbiota DNA sequence
catattagatttttagaatacacaatctgcgatataacttactatatttcaagcattaacaccttaatttattaaataataaacagcgcttctagagaagtttaattcctctcccgcaacacatgaatctttagccccaaaaactgtctaagcttctccgaaagatgcgagatatgtcagacgattgcacgttttcgtgtcttcgacaaagcttctcacgcaggtgttgaccattttattatgttcaacgtaatatagtaaaatggcgaacgctacttcgatatacgtgcgactgatattgtcaagaataaataagaagactgttcaacatcttccggttcgtccggcaacacacgtaacaataaataacaacaactattcatcctattcacgttattttcttatgatggagacacattttgaagatggtgggaatcagattgcaggtttagtccgggaaaatttaaatatgcccgccaagtccttctctgctcatttcttcctcgtttttaatccaatttccgttttctgaaaatcctatagtggacttttgaactttactggactttgctggaggaattttggaactttcgatctctccctcagcaacacatctaaataaactttattttacaaacagtacaatacaagtttatatacttcaatatacaaaaggaaagggaaaagcaatatgacgacagtcaacaagcatttccctttatttaacagtaaggtattatttatactaccttctatacattattcagtgtatccggctgatacaacacgctatttatcaccgtacatcttcgcccttaactccttgatatgatccgaagtgatatattcgtcatattccatcatcttgtcgatgataccgttcggagtcagttcgataatgcggttggcaaccgtctgaataaattcgtggtcatgcgaagagaagaggatatttcctttgtacgtcttcagattgttgttgaaagcctgaatagattccaggtccaagtgattggtcggagtatccagaatcagacagttcgcattgcggagctgcatacgtgcaatcatacaacgcatcttttcacctccggaaagtacgctgactttcttcagtacctcttcgccggagaacagcatacgtccgaggaagcccttcatgtacacttcgttaccttcgccgaactggctcagccagtccaccaggttaaggtcagtgttgaagaagtccgtattgtccagaggcaggtaagccgttgtgatggttactccccagttgaactgtccggcatccggcttcatgtttccgttgatgatttcgaagaaagcggtcatcgcacgcgggttacgtgaaaggaataccactttgtcgcccttttcgatgttgaagttcacgtcgctgaacagcactacgccttcttccgtcttcttgctcagtccggaaacttcgaggatctggttgcccggctcgcgttcgggagtgaagatgatgcccggatacttgcgtgaagaaggtttgatttcttctacattcagtttttccagcatcttcttgcggcttgtggtctgcttgctcttcgctacgttggcactgaaacggcggataaattcttccagttctttcttcttctcctcagccttcgccttctggttctgctgctgacggagcgccagctgactagattcgtaccagaaactgtagtttccggcaaacatattgatctttccgtagtcgatgtctacggtgtgcgtacatacggagtcgaggaagtgacggtcgtggcttaccaccagcacggtgtgctcgaagttggaaaggtattcttccagccaggtcactgtttccatatcgaggtcattggtaggttcgtccagaaggaggttgtcggggttgccgtacaatgcttgcgcaagcatcacacgcaccttttccttaccgctcagctcacccatcaatgtataatgcttgtcttccttgatgcccagaccgctcaacagcatggctgcgtcactctccgcattccatccgtccagctcggcaaatttctcttccagttcggatactttcagtccgtcttcgtccgtgaagtcttccttggcgtacaatacttcacgctgcttcataatgtcccacaacacggtgtggcccatcattacggtgtccattaccgtataagcatcccatttaaagtggtcctggctcaacaccgacaggcgttcgcccggtcccagggcaatcgtaccggtcgtcgggtccagatctccgtagattgtacgaaggaaggtggattttcccgcaccgttcgcaccgataataccatagcagttgccacttgtaaatttcaggttcacgtcattaaacaagactcttttaccaaactgcaccgaaacgtttgaaactgtaatcattttctattatttactattttaccagttactatattattatttgagcgtgcaaaggtagacatttaaaatgaattatgagctatccggaatgtgtcaatctggcataaatgtattacctttgccacgttttttggcaaaacggtcagattggcaaagtttttgcttgggaaattgatattatgaataaaaaataaaaataagatatggatccaaaagaaaaagaaaagatggctgaagagctgaatgtggaagaaacaaaggatacggcggaagaacaaccgcaagacgatcaggcagaagaggccgctcccctgactcatgaggagcagctcgaaaaggagctggaagatgctcaggctgtcatcgaggagcaaaaggacaaatatctgcgcctgtccgctgagtttgacaattaccgcaaacgtaccatgaaggagaaggcggaactgattctgaatggtggcgaaaagagcatcagcagcattctgccggtgatcgacgactttgaacgtgccatcaaaacgatggaaactgccaaagacgtaaaagccgtgaaggaaggtgtcgaattgatttataataagttcatggctgtcatggcacagaatggtgtgaaggtcatcgaaacgaaagaccagccgctggataccgattatcacgaagccattgccgtcatccctgccccgtcggaagagcagaaaggtaagattctggactgcgtacagacgggatatacgctgaatgacaaggtgattcgtcacgcgaaagtagtagttggggagtaaatacaaaagttagtttagttaagaagcatggcagaaaaaagagactattatgaagtgctggaggtgacaaaaaccgccacagtagaagagattaaaaaagcctaccgcaaaaaagcgatccaatatcaccccgacaaaaatccgggtgacaaggaagcggaagagaaattcaaggaggctgccgaagcgtatgacgtgttgagcaatccggacaagcgttcgcgttacgaccagttcggtcatgcgggagtaagcggtgcggcgggcaacggaggtccgttcggtggtttcggtggcgaaggaatgtctatggatgatatcttctccatgttcggtgacatcttcggaggtcgcggcggtggtttcagcggcggcttcggagggttcagcggtttcggtggcggtggcggtggttcacagcaacgtcgctatcggggcagtgatctacgtgtcaaggtaaagatgactttgaaagaaatctcgacaggagtagaaaagaaattcaaactgaaaaaatatgtgccgtgtaatcactgtcatggcacgggggccgaaggcgacggcggttcggagacttgtccgacctgtaaaggtagcggttcggtgatccgtaaccagcagacgattttgggtacgatgcagacccgcaccacttgtcctacttgtaacggtgaaggtaagatcatcaagaacaagtgtaaagagtgtggcggcgacggtatcgtatatggcgaagaggtagtgacggtgaagattcctgccggagtggcagaaggtatgcagctctcaatgggcggcaagggtaatgccggaaagcataatggtgtgccgggcgacttgctgattctcgtagaggaagaaccgcatccggacttaatccgcgacgagaatgatctgatctataacttgctgctgagtttcccgactgctgcactgggcggtgccgtggagattccgacaatcgacggaaaagtgaaagtgaagatcgactcgggtactcaaccgggaaaagtgctgcgtctgcgcggcaaaggtctgccgaatgtcaatggttacggtacgggagatttgctggttaatatcagcatttatgtgccggaagcattgaacaaggaggaaaagag

SEQ ID NO: 4694 - DNA, 2308 bp, Unknown
  gut microbiota DNA sequence
agtagccggagtattctacttaactactctaactactgactactttaactacttaaaaagaatatggctgaatcgaattttgttgattacgtaaagatatactgtcgctcgggtaagggcggaagaggctctacgcacatgaggcgcgagaaatattgtcctaacggaggccccgatgggggcgatggtggaagaggaggtcatatcatcttgcgcggtaaccgtaattactggacattgttgcacttgaagtatgaccgtcacgcaatggccggtcatggtgaatcggggagcaaaggacgtagtttcggaaaagacggtgcggataaagtaatagaagtgccctgcggaacggtcgtttataatgccgagaccggggaatatctttgtgacgtaacagaagacggacaggaagtgatcttgctcaaaggcggtcgcggtggtcagggtaactggcatttcaagacggcaacccgtcaggctccgcgttttgcgcagccgggagaaccgatgcaggaaatgaccgttatcatggagctgaaactgcttgctgatgttggtctggtaggtttcccgaatgcgggtaagtcaactttgctttcttctatttcggctgccaaaccgaaaatagctgattatccgtttactacgctcgaacccaatttgggtatcgtttcctatcacggtggaaagtctttcgtgatggcggacataccgggtattatcgagggagccagtcagggtaaaggcttgggactgcgtttcctgcgtcatatcgagcgcaattcattactgctgtttatggttccggcagacagtgacgacattcgtaaggaatacgaagtcttgctgaacgaactgcgtaccttcaatcctgaaatgttggacaagcaacgtgtgttggctgtcaccaagagcgatatgctcgatcaggaattgatggacgaaatagaacctacattgccggaaggcattcctcacgtattcatatcttctgtttccggtttgggtatctcggtgttgaaagatattctttgggaagaactgaataaggaaagcaataagatagaggacatcgttcaccgtccgaaggacgtaacccgtctgcaacaggagctcaaagacatgggcgaagatgaagatatcgtttatgaatatgatgacaatgttgatgatgatgacgatgatatcgactatgaatacgaggaagaagattgggaagaaaaatgatttcacttacaaaaaataatgagttgaagggatataagtcactggatgtatatcccgaggtagctcatttcgtaacaacgcgtcacgaaggtataagcaccggagcttacggctctttcaactgttcgccttataccaacgactcatgcatgaacgtcaatcgcaatcagagctggttgtttcagtgcatgaatcatcagataaaggagttgtttattcctgaacagagccatggttgtgccagtctgattatcaatgaatcattttttaaagagtcattagaaatgagacggctacttttgcgaggaatggatgccttgataactaatgtgccgggatattgcgtttgcgtcacgacggcggattgtgttcctgtattgctgtacgacaaaaaacaacacgttgtggctgccgttcatgccggatggaaaggaactgtgaagcatattgtcagtcatgtgatggatcacttgaatcagaaattcgggacgcaaggcgaagatgtggtagcttgcatcgggccgagcatttcgctcgaatcatttgaagtaggtgatgaggtgtatgatgcttttaaagaaagcggtttcgatatgtctcttatttctatgaagaagaaggagacgggcaaatatcatattgatttgtgggaagccaaccggattgaattactgaatgccggagtgcctgcagaacagatagaagtagctggcatctgtacctatattcatcatgatgaattcttctccgcacgtagactgggaatagattccggtcgtatcttgtcgggaataatgattagaaagtaataattggtgtctgtaattgcaggacgctgatgattagtttatgataagttatgtttgaaataaaagtatctaaagaaataaaagacgcatgcccggttttcgccggagccgccgtgtatgctgaagtgaagaatactgcttacagcgaaggtctttggcacgaaatcaatgctttcaccgaacaactgacttccactacacagatggaagacatcaaacatcaacctgttatctttgctacccgtgaggcttataaacgttgtggcaaa

SEQ ID NO: 4695 - DNA, 1921 bp, Unknown
  gut microbiota DNA sequence
aacgaactatcaaactaactaacagaagaaaaacatgtacggaaaaaatcttaaattagtattaatggtaatgttgctacttgtgagtaaatccactttctctcaagtaacagaacgcgaacgtcccaaagagtggagtcaactggtgaaaggtgcccggtttatggatcgttttctgccgatgaaaggcaatcaactgtcatccgacacatggggaacctccgatgtgcgaccgcgttatgttgataatggtattgaagaccgtgtctggtcctattggggtggaaatatccggaaaggagaagacggtaaatatcatctgatggtttgcggatggctggaagcttctcctaaaggacacatggagtggagaaattcatgggtgttcaataccgtgagtgataatctgaccggtccgttcaaaccggttaatatcatcggaaaaggacataatccggagatgtttcaggcaaaagacggccgatatgttttgtatgtcatagacggccgttatgttgcggatgatatcaacggaaaatgggaatatggaaaattcgacttcaatgcgcgcgatcgtagaatcatagaaggcctgtccaatctttcgtttgcccaacgggaagacagttcatatgtaatggtctgtcgtggcggtggaatctggatcagccgggatggtttgtcggaatataaccagttgacagaccgtcgtgtttatccggatgtgaaaggacggtttgaagaccctgtcatctggcgcgatcatatccagtatcatctgattgtcaatgactggttgggccgtattgccttttatcttcgttcaaaggacggagtcaattgggtaactgatccgggagaggcctacatgccgggagttgccgtacacgaggacggacattctgaaggctggttcaagtatgaacgtctgaaaatgtatcaagataagtatggccgtgctattcaggctaattttgcggtcattgatactttgaaacatgaagataagccatttgataatcacagttcaaagaatatcagtattccattgaatccgggactattgctgacagtgttgaatgataagcccattaccgccggaacgaagactatccggctgaaagtacaggcagaagaaggttttcatccacaaaccgatatggatatcagttctttgcgttttggcgcttccgaagaggtgaactatggcagaggaagtaaggtattgaaaacagagaatgacggagatgacctgattatcaccttcgatggaaaaggaaatgggattacagagaaagaatttgctcctaaattgataggcagatataaaaacggaaagatgctttacggatatgcgcgtttgccgtatgttgattatgtggaaccgattctttctgcgcgtgcccctgtattctctgaatcgcaaaaaggctggaacgggaatattgaagtacagaacttcggacaagttagctcacaaaaggcttcggtcaagatagagtataagaaagaaggcaaaatggtcaaagtggcttctgctgccgtacctgctttgaaaccctatgaaaaagctgacatccgctttgcgacaaaggctgattttgaaaaaggtgaggactataacttccttgtgactatttattccggcaagaaagttctctctactttccgtttgaatcggaaggtagttgaataattgaaagactaacaattgaaagattaccatgaaaaagaagatcacatttttattgatgtttgtactgtcgttgtcaatggtttcagcacaaggtactttccggtttgggacatctgcaacacccgaaggcaaaactcttctggtggatagcaaggggcttatccttgacggcaagcatatcattcccgtcatgggcgagattcactattcccgcgtaccggagtc

SEQ ID NO: 4696 - DNA, 718 bp, Unknown
  gut microbiota DNA sequence
cttcaaatttttaaataacaatgaccaataaataatttaaatagcattgagtaaatgcaattgtctcttcgtatttgtctataaacttatagcaaatatgaagagacaattcttattatttatatttatcacttgtgcggttgtcacgaatgtgcagagtgcaaaccaaagtataaatggaacttacaatattttgaattatggcgcggacacactgaatgtctgtacacaagccataaacaatgctattgagagtgcctaccgaaatggcggtggaaaagtgataatccctgccggaagattccggtcgggtactatttttctgaaagacaatatcgaattacacttatcgggtggagccatattggaagctagtgacgattattcagattttcctcttataccgcctactacctatcgttcattgaaagatgccggtggatggtctgcattaatctatgccgaaaaggcgaatcatataagtatcacaggaaaaggaacgattgatggaaaagggaaagggagaaagggacgtgttcagggagttgcaggagattgcaatggacgaccgcgtaatattcttctaatatcttgcaagaatgtatctgtctcgggtgtgacgatgcttaattctgccatttggaaccaacattatctggattgtgaagatgtgaccgttacagatatcagagtttttaatcatgccaacggtaacaat

SEQ ID NO: 4697 - DNA, 5293 bp, Unknown
  gut microbiota DNA sequence
ccgaccctgtcgatgatcacaagagcaagaacggtggtcagagtgttgactagtcctacgagaacttggtaaaaaaacgcaagtttgtcgctttgactgttaaatatatgcagagaaaatcttatctttgccttcgttaaactaactaatacccccatttatgaaaagaaatcattatttatttacccttattctcttgttagggtgctctatctttgtgaaagcttcagacaccgtttttgtacatcagacgcaaattcccattttaattgagcggcaggataacgtattgttctactttcgtttagatgcaaaagaaagccggatgatggatgagatcgttttggattttggaaggagtgtcaatctgtcggatgtacaggctgtcaaactctattatggcggtacggaagctttacaagatagaggaaagaacagatttgcacctgttgattatatctccagtcaccgtccggggaatacattggcagcaataccatcttattcgataaaatgtgcggaagtcttgcagccttctgcaaaagttgttttgaagagtcattataagttgttcccggggattaatttcttttggatcagcttgcagatgaagccggagacttctcttttcactaaaataagttccgaacttcaatcagtgaagatagatggtaaagaagccatttgtgaagaacggtcaccgaaagacattattcatcgaatggcagtgggtgtccgccacgccggtgatgacggttcggcttctttccgtattcccggattggtaacttcaaataaaggaacgctgcttggcgtatatgatgtccgttataatagcagtgtcgatctgcaggaatatgtagatgtcggtttgagccgaagcacggatggcggtaaaacatgggaaaagatgcgccttcctctttcgttcggtgaatacgatggtttgcctgctgcacagaatggagtaggggacccttctattttggtagatacccaaacgaatacaatctgggttgttgccgcatggacacacggaatgggtaatcaacgtgcctggtggagttctcatcctggaatggatctatatcaaacggcacaactggtgatggcaaaaagtacggatgacggtaaaacctggtcgaaaccgattaatataaccgaacaagtaaaagacccttcttggtatttcttgcttcagggaccgggacggggaataacaatgagtgatggaactttagtattccctactcagtttatcgactctacccgtgtacctaatgccggtatcatgtatagtaaagaccgcggaaaaacatggcagatgcacaacatggcacgcaccaatacaaccgaagcgcaagtagtagaaatagagcccggagtgctgatgctgaatatgcgggataaccgtggaggaagccgtgctgtggcaattacaaaagatctgggcaagacatggacagaacatccttcctctcggaaggccttgcaggaacctgtatgtatggctagtttgatccatgtggaagctaaaaataatgtacttgataaagatattcttttgttctcgaatccgaatacgaccagaggacgcaatcatataactattaaagctagcctggacgatgggctgacctggcttcccgaacatcagttaatgctggatgaaggagaaggctggggatatagctgtctgacaatgattgatcgggaaacgattggtatcttgtatgagagtagtgcagcccacatgacatttcaagctgtaaaactgaaagatttgattcgatgaaaagtcttcgaatctttttggggattgcatttttattccataccttatgtatattgggggcagatcatttgcgtctgcttccccaacctcagcaatgtgtgcttgcaaaaggatattttgtcgtggggaaaatgcagctttccactcctgtgctttcgcaggaatggaagcagtttgtgacggaaatgggaggtactctgactgatcagtcggcatcctctatcaatataaaattggttgatgcgattggcaatgtacctgtcaatcaggatgaggcttatcgtctgactattactccaaaggcaattactgtggaggctgtagcagagcgtggagtatattgggcgatgcaaacgttatatcagctaaaagaagaaaagggaaagaaaatccgactgcaatgtggtactatcactgattggccggctttcaggattcggggtttcatgcaggatgtagggcgtagctacttgtctttggaggagttgaaacgtgagatagccatattatcccgatttaaaatcaatacctttcattggcacttgacggaaaatcaggcatggcgtctggaaagtaaaatctttccgatgttgaatgatagtgcgaatatgactcgtatggcgggtaaatattacacgttggaggaagcgagagagttgaccaagttctgtaaagctcatcaggtactgttgattccggagattgatatgcccggacatagtgcggcatttatccgtactttccgtcatgatatgcaaagtccggaaggaatgaaaatcctgaaactcctgctggatgagatttgtgaaacgtttgatgttccatatctccatattggaacagatgaagtgcattttaccaatccgcagtttgtgcccgaaatggtggcttatatccgtgataaagggaaaaaagtgatttcctggaatcccggatggaagtataagacaggtgagatcgacatgatgcagctttggagttatcgtggcaaagcccaacaaggtattcctgctattgactcccgtttccattatttgaatcattttgatacgttcggcgatataattgctctatataatagtcggatttataatgcagatatgggaagtgatgatcttgccggagtcattatgggtatctggaatgatcgtttaatcgacaaagagtggaatatggttctggaaaataacttttatccgaatatgctggctatcgcagagcgttcatggcggggaggaggaactgaatatttcgataagcagggaacaattcttcctgtagatgaaaactctgaggtctttcgtaattttgaggacttcgaaagtcgtatgttatggtataaagagcatctgtttaaagggtatccatttgcctatgtcaaacagactcatgtaaaatggaacattacagatgcttttccgaatgagggggatctgactaaagtttttccaccggaagaagagctgaaagattcatatacctatgaagggaagcaatatggagtgcgtcctgccataggagccggtatctatcttcggcacgtatggggtaagattgtgccggctttttacaaagatccacaggagaatcatactgcttatgcttacacgtatgtctattcttctaaaacacaggaagtaggcttatgggctgaatttcagaattatggacgttcagagaatgacctgccgccattgccgggaaagtgggattataaagaaagccgtatttggattaatgatcaggaaatactgcccccggtatggtctgctactcatctcgtgaaaagctcggaaacagccttaggtaatgagaattgtgtggcacgtccgccactacgggttcatttgcataaaggctggaataaggtattgctgaaactgcctgtcggcaaattctcaacgaatgaagtacgattggttaaatggatgtttactgcagtatttgtgactcctgacggcgataaggccgtagaagggctgatctattctccggaaaagaaaatgtaattgacttttatatgatgaaaaatgtattattaattgttgtttccatcttgtttattacaacagcgagtgcacaggaaaatcgtattaaagttgcctgcatcgggaatagtatcacctatggttatggattgcccgaccggactacacaatcgtatccggcgcaattacagaagatgttgggagagtcttatcaagtcgaaaacttcggcaaatcgggtactaccttgttgaataaagggcaccggccttatatgcagcaagatgagtatcgcagagcgatcgactttggcggagatattgtggttattcatttgggcatcaatgatacagatccccgtgattggcccgattatcgtgatttctttgtgaaagattacattgaattgatcgattcttttcgggcggctaattctaaagtccggattatgattgccagacttacgcctattgccgatcggcatcctcgtttcctgtcagggacacgtgactggcatggagaaatacaattggctattgagaatgtggcacgctataccggagtacagttgatcgactttcatgagccgttgtatccataccctttcatattgacggacgccgtacaccctgatcccgaaggagcgtttattatggctcagaccgtatattccgccattaccggagattatggcggactgaaaatgtcgttgctttatacagacaatatggtattgcaacgggatgttccgttgacggttcaaggaattgccaatgccggggaccgggttactgtaagcatagccgaccggcaaatgaaaacaaaagcaggtctgaatggaaaatggtcggtaacgctgcctcctttaaaggcgggtggtccttataccttaaagatctcaacggatgagacgggttttcaatatcaaaatgtgttagcgggtgaagtctggctttgttctggtcagtcaaatatggagtttatgctgaaacaggcttcgactgcccgagccgatattccacgtgccgtagatcagcaacttcgtttgtatgatatgaaagcacgttggcgcacaaatgccgtcgaatgggaggcgaacgtacttgattcgttgaatcatctccaatattataaggatacggaatggaaaaattgtactccggcgacagcttctgatttctcggcaattgcatactattttggtaagatgctaagagatagtctgaatgttccggttggattgatttgcaatgccgttggaggatcacctacagaagcctgggtagatagagctagtttggaatatcagtttcccgccattttaaaagactggactaaaaatgattttattcaggaatgggtgcgcggacgggctgctttgaatataaaaaagtcagcaaatagccagcagaggcatccgtatgagccttgttatttatatgagtcggggattcggcctttggaacagtatccgatacgaggagtaatctggtatcagggagaatcgaatgc

SEQ ID NO: 4698 - DNA, 377 bp, Unknown
  gut microbiota DNA sequence
cccttaaccttcgtcacctgaccattcatgtaaacaatgaacttcttactcttccttgcattatcagaatagccaccggcctgattcaggtaataatccacattctttcccttcatataagaaaccgtattcggaaccatgacagcaccattgatagttacagtattagtattcttaggtataaagaccacatcaccttcacgtaggacaaggtcggcactacccttaggattagtcaaagccttctccagatcaatgcctaccgtaaaggtatcctcaacaccaatacccaaagagtcaatcatggcttcacccaattgcctgctcatcaggcgaatcacatcacccatacgtttcttctcaccggcacttgccac

SEQ ID NO: 4699 - DNA, 239 bp, Unknown
  gut microbiota DNA sequence
atattctgcttcaacagttcaatcaccacttcctttttgggttgcggttgttctactacaggagccggtttgggttgttccgtcactaccggttccggttcgtaatagaccggggcggttttagtgtagcttttacccagtctgatacttacaccgacaagggcattcagttgccagtcacagttaccggccttcttggagttgaacttatcagacaaggcgttggcattcgcttcgat

SEQ ID NO: 4700 - DNA, 4539 bp, Unknown
  gut microbiota DNA sequence
ctacatccttggagtgactctagtacatcatcataacaactcttgtacttctttctatttactctaatacaaataaaaagcctgcttggcaggctaacaatgaaagaatcagccacctactaaataaagttgaaatccaggtattcagttctttcagtaatctccgcaaaatccctgtcagaaggagatacagctgaaagcagtagtctctgaaaagaggtttcagcattcagctctttcagtttcaaaaacagagcctgcgtttgttccaatcagaagttctatttactaaaagtaaaaggtctattttacttaaacagaggctctattcattcatcatattttcagcgctgtttctatcattctcaccttatttgtcagcaaactttagctcggaggtcagcaagcctaagcctacacgtcagcaagcctgagtcgacgggtcagcaagcctttgcccgtacgtcagtcagcctttgcctacatatcaaccagcctttgttcagaaattaagatatacatagcttatcgactataaaagcagaaactcaaactataaacctgaaagaactgaaaccacgcccccgctcagagcacgtctacgcaagggtacgaaatggtgccttcagccgctatcaccttctatcaaggcttttccgaagaaagctgaaacggctgaacgctatttattcaatgaaacttctaaggagataaaactgcaagaagctccaattaccgaccgactttctcccgatactctgtcggagtcataccgacctgcgccttaaaacatttactgaaataacgcgggtcattgataccgaccatataagaaatctgagtcatattaaactctcccgtttcaatcaattgtgcggcacgcttgatacgcatttcctttatgaactcgataggggccagtcccgtaagcgtttttagtttcttgaagaacaccgaacgactgacagccagttcacgaaccaaatcatccactaccaattccccgttatccatattctgctccatcaaatcaaccagtttatccataaatttacgatcgttaggagacatttccggcatcgcaggctcttccgctgcactacttacgggttcagcagatgcatgacctgctaaagtctccccttgagcaaccggagtttcagacaccgtcacatgcgtcagactatcacgatagaaattttgcagtttcttacgctgcatcagcaggttctccacacgggcctgaagataagtcgcactaaaaggcttggtaatataatcatccgccccatattccagtccttccaatttactttctatcgtcgtcttggcagtaagcaggataataggaatatgactggtcgtcatatccgcacgaagttcacgcgtcatttcgataccgtctttctccggcatcatgacgtcgctgataataatatccggcagatacttcaaagccttgctccatccctccataccctcggaagcctctaccacccgataagttgaagcgaaaatactgcgcaggaaggaacgcaattcctgattatcctctaccagcaacataagctctttcgaactgctttcctcagcctcttctttgacagcagatacttccaggtccggtgcatctgcgatggcagcttctgtctgaagcgaagaattagcgatatccacaatacgttccatgctcagcggagcaaccgaatcttcgagaataaattccactgaactattataatgctctttgcccttcagaaagtccactttaaaacaacttccctcaccgagccggctgtcaacggaaatcgtagccttgtgcatctctaccagttccttcaccaaagaaagaccgatgccggagcttgcctgattgaaaatattcttgtccaccaggttctcaaagcgtacaaagagagacttacgtttattttcggcaataccaatcccctgatcctgtacgccgacagacaccgtgccctcatcttcacggataaagacggtgatcattttcccattaggagtatatttaaacgcattggacagaaggttaaacacaatcttttcaaacttatcggcatccacccaaagattcaaagcctctttctctgtctggaaaaggaaatcgatgttgtgttcttccgccaccgactcaaaattatccataatcttgcggacaaaggcaacgacattcaactgttgtacctgcatcttcatcttcttgttctgaatcttacgaaagtccagaatctgattgaccagacgaagcatacggttggtattccgttcgaccactaccagctgttcccgtgcatcagccggcagtttatcgttcttcagaacttgttccaccggacctgcaatcaatgtcagaggagtacggagttcatgggatatattcgtaaagaagcgcagcttgatatcagaaatctgttgttctacagacacctcatgcttcaaccgataaatggtaaacaggatataaaccgcaacaaaaataatcagcagcacaaagcagacatacagcacatacgccaaaggcgtctcccagaaagaagggagaatcgtaatgttcaagatgcgctcattgtccacccacaccccgtcactattggtagaacggacacggaatatataatctcccttcggaaggttagtataagtcacgcttctttgccggtcggcaaaagtccactgcttctcgaaaccatcgagaatgtatgcgtactgtatgttctgcggattcgtataatcgagtgcagcatactgaacggaaaagatattctcatcatgagaaagcaccagttcctgtgtatcatccaaatcgactttcaatatggacttctctcccggaattacatcttcattcgctaccatcaacttagaaaaaactacaggaggcacatagctactcttccggatagaatccggagtgaacatgaataatccgttgctggttccaaacaacatatctccgccggatgtcagcgtagaagccgcttcactgaaacggacacggaaactgatactacgttcatcgtaattctcaaaacgctcgccggaaggaacaaacttacagattccattttccgtactgatccaaaggttctgtttatgatcttcacggatggaaagcaagacgtccgaagaaagtccgtcgagcactgagtaggatttaaattcaccgtgaccgttttcgctgatggaaatcagtttattcagtccccctccgaaagtagccagatagagttccttctgctgggtagcgataatccaatgcacgtcattattacttagactcttcgtatcgttcgggacacgcgagaagtggtggaactgtatatcttccggctttttgaaattctcatcaaaggcaacggcgcctgtggtagtacctacccaaaggcgtccgttattatccgaagtgataaaacgtgctttgtaacagacatcaatcggatatcctttcagattattccggtggttgataaagacggtctctccatgttctccctgggaaatatagttgataccgcctgcaaaagtagccgcccagatacgaccatgatgatcttcataaacacaatatacattgttgtcactcagactgtacatatcgttggagtcgtgctgataacgggtcagtttataagacatacttgtgggagaaatctgttcggcacgcaccagaccgtttcctttggtagcaatccagataatcccttttgaatcctgcataatgaaataggctgtaccctccataggtgtacctgtcatcgaaatggttccattacctgtcagatgccctatgaatttccggttcgagtcgtacaggcggatcattccgtccttcagtccgacccacaaattcccctgtttatcttcgcataccgaccgcacttcgttgctcaaagattcatattcatgcggaacgggagtcagcattgaaaacggtacgttgcggaatgttactttctccagtcctttggagtgggtacaaagccacaaattcccctgtttatcagaaaaagcggcatgtatcttgttagaaaagcgccagttgttactgcccaaatcatcataaaaaggaacgagacagttccggtcacgatcaaaataggagaatccgccgccataaggatgtacccatatatgcccgtgtacatcttcatggatatgaaaagcgggacgcgaacgatcggcgttactatattccacccgcatctgctcacgccttaccacgccggtggcaggattaaaatgaacgacaactcccggctcttcctgttcgaaccatacctctgacgtgcggtctacataagccgaaagaatcggttgtgcagacaattccttacaggtcacgggagaataatgcgtatgtttgtttgtcttcaggttgcaaagaaagaacccgtccgaatctgttgtcactacagtattgccattgctcacggtgtgtatagaagtaatgcgggctttcgtcggaagttcgagcaggcgaaactctccgccctgtttctgataacaccagattctccc

SEQ ID NO: 4701 - DNA, 1640 bp, Unknown
  gut microbiota DNA sequence
accggacttcgttgaataaatatctgatttcgtcgtatagttcttctgaggaagcgtgactacacggatagctccatcatgttctgttagcagccagaccgtaccatcgggcaatacctgaatagcgtgaatgttatatgtactaccttcttcacctgctgccggaacctgttcgaacgtctccgttttcgggtcaaaacggtggacacggttgtcataagtcaataaccacagaaagccgtaccggtcttcatacatccggtcggcacggttattggtcagactgatgtaattgccctgacgtgctttataagttttaaagttatagccatcaaaacgattgattccatcccatgtggcaaaccagaggttgtctttgtgatcctgcaacatgctcatcaccgtgttttgagacaacccatcctcggtagaataatgggtgaaaaaactgtgttgttgtgcctgcactacaggtgcggtcaggcacaaaagaattagatataagattctttttatcattattacacacatattgaatggtgtaaagataatgatttagctgaacttacatctatattcggtgtttatttaacagaatcgttctttagcggattccagccgtcttcacctgccaaaaccgtttccatctcgtagcctttcagattcttcagttgacgagagaaagctgcgcgggctttcggattggctccctcgccatgactatcgtattcggcataaaatacggttttctccgcttctttctttccccagttgtgccagccttccggaaggatatgtttccccagttcacaacggataaatacagcctgtgcatacggacgccacggacgagacagatatactttggcaacatccggatcagcagtcaaccggcaatcataaaagacatatccatactttttgccttgatctgtagagggtgccgtcacataaccatcacgtttgctatgaatatgacaacgattgaatacagctacagaccatccgaagataaagtcaaccgttccttcgatatagcaatcctcgtaatattgacggctgtgcttgccatacgtataaagggtatcctgataaccgagaaaacgacaattcttaaagaacgcacggtcggcagatacaaaacaggcaacagcctgtcctaccggtcctgccgagttttcaaaagtgatgttctccgcatagaaatcgggagcataaatgtagcaactcgacgatcccgaagttcccatattctcaccaaacacatttttcttattggcaaagtcatcatttgtcagtaccacaccatcctctcctatcagagagatatttattttggattccggaataataatcttctctttataagtgcctttacggaccaagatagtagtacgcacattcttgcgaaaatcgggtactgcatttatcgcttcctgcactgtgaagaaatcacctgttccgtcttgtgccactacgtaatcataatgacggacatattttgccagttccggtatttcctttgcgatagcatctacagtcagcccggcgatagtccgtgctccgtacacattcaaatgggtattatcctcccggcctttcggaaaagccggaactttctcaggttcgacaaacataaa

SEQ ID NO: 4702 - DNA, 971 bp, Unknown
  gut microbiota DNA sequence
agccttttcatcattgtgtccgaactggataaagacataatctcccttctttacctgggaaatcacttttgcccatcggccttcagatatgaaacttttggaactgcggccattggcggcatgattatcaacacgtatatcttctgaaaaaaatccggggagcaccatacaccagccgcgttcgggatttccaccgtacagatttttgttagccatcgtagagtcacctatcgtaaagatggtcaatacgggcttatccgcacgaaaggcggagaaaaggataaatactataaacagcaatagcagtctgtttttcataatcttattttgttggttcaaaattaaagttcccttatgacttctatttaacgtgaattcgatataaatttgagtaactcaattctcctccttccaaaaggaggggaaaccatgcggattactcttatatcgaactgatgttatttataaggataccaattactgcattccttaaatatattctgcggagtatattgcaccgcttctttatcagtcagctgtttagcccatttcacacgtccggaagcatccgcaccttcacccgtgtttttaaattcagcgtaacgggcagtcttttcgttttccggattcttccagttgtgccagccttccgaacggatatgtccgccaaactcgcaattaataaaagccgtagcagcataaggtctccaaggacgtcccagatagactttcttgataccgggagcggctgtcagcttacagttcttgaaaacataaccaaactccacctccttcggagtagaagccgcggtaatatatgaatcgcgcttgctatgcaattcgcaatattcaaacaaagctgtagaagggccgaagatgaagtctgtagttccttcaatatagcagttagtaaataacaggcggctaccctccgatcctgtataaatagtatcctgatttcccagaaaacg

SEQ ID NO: 4703 - DNA, 1828 bp, Unknown
  gut microbiota DNA sequence
tgaataatgcttggataagaatattggctgatagggctgtcttctaatgtgagaataggtttccagttgattccatcttctgatatggctacgcagagaggagtacggggacctttcggtgtacctggcaatgtggagaaatgattgtaaatgagaatgtgacgtccgtcactcattgtcacggcatctgttccagaattgttgttcggaacattgcttaatatcactttactccatgtttcaccattgtcgctgctccatgatgttgcaatctttgcattgcgtgtacggcaaagtacctgcaatcttccatccttatgctttaggatactgggttggatagcaaaaatcggttgtgccccttttccctgaatagcttctcccgcttcctgatcatctacgttaataccatctttcttacggttctgagtcgggacagacagttcggcaggtaccgactctgtcgttttccaggttttgcctttatcatccgaatattcaaaatgaatgcgccatccccctttgccctctctgcttgacgggcagatgatgcgaccgttgatgtattccggtttgttcttgataggacctagaaatccttccggcaaggcttcacgtttgctccaagtttttccaccgtcttttgaacgaaccagccagccggtccagtcgcctacatttagtcctattttgtagaacagaattaaatctcctcccggtatctgaaaaagtacaggattccagcaagctttccggcgggcagtcagttttcctttggcatccactacaggagtgcaggtcgaatctatgccggctaaagcagcctgcgaatctttgagtgaaaaaattccgtcggcagccagcttgggagccgtccattctttggcacctttgggcttgcggcaaacccagatgcagcaatccggattacgttctttggttccaccgaagaaaaaagcaacgaggtcaccgtttttcagttctacaatggttgccccgtggcattccgagaaagaagctttctcatatagaaattcatcgctgatgatggcagcattccgtgtcggtatatctacgctgaaatgatattttccggaacctattttttcttttcgtccatctggcagatgcacttctcctgtagtattggcaggaagtacgatatcccattccagatgcataggagtctttttccatcggctggtaatctttccgtagatactcatataagaagcatccacgttactcaattcctgaatttcgaaagcaggctggaaaacaatatgtttgtaaccggatttccaacggtcggcacggatacctgccagattgttgaaacaccagggaagtaagtctcctaataacataacatggtttccgctgttcattccgggatttgccgtgtcaccgttccaaagttcccaaatagtggtggcaccttgtgccgccatatacccccacgaaggatatgtatcattggtagccaacagataagctatatctgcatggccccgacgagtcaattcacgcatcagccattgcgtaccgattactccggtactgatatgccctttgttcgttgtaataatggtggttactgcattctttgctacttctttgatatgcgctttaggcacgagaccgaaggcaagtggcagaatattagctgttacagtattattcccgtagaaaacactatccggatataaagtatgaccgggtacaagtgaagtaccttcctttatatgcaggaaatgtgcattgaatgcatccttcattttatgttccaggtcttcccactctttggcatccgcagtcaatccctgaa

SEQ ID NO: 4704 - DNA, 3249 bp, Unknown
  gut microbiota DNA sequence
attgtagtttgaataataataaaaaagatttttaccattcataagaaatactgatctgaggcacccattcccatcttttttgtatggtgttgtattgatattgtacgccggttttcaatttccagcctttacctacttttaaaacaatgtcgctgcctagtgtggtgggtattgcttcagaggaaagtccgcggtattttcgggtgtccagattttgtttaccatatatgctaagaaaccattttttagagagcttataatccatttgagtttggatatgaaagtggtttgaactttcactaaagttacttttactatgcagagtgaaatttttgtttattttgagccgtgaataagtgggtaagaaagtagaattggtctgtcgaaagatgttatgagtatgaaaaggtaatttcggagatatgattgttgatttaagagtcggtaatgttggatcaaagtcaacaaagggttttgtatgatataacatgttttgttctgtcttctttacgaattccttattgattctgatttcttgctcagaatttaatgcttgctgtagcctcaatgaatcttgtttgctccactcttgtcctgttacggataaaggaagtaatatcagacaaagagtgcttaaacgatatttataaacgttcatataatgtgctagttaagtttaattatatggacgacgaaaaagtgaaaatgctgctttatgtaatcaataaataatgggtatttcacataatatgagaatacttttctttttttgtataggtgtattaagcacatttatcgtgtccagtcgcacctatggaaacaaaacctatatagctgtttttttatgtattgagtgataagttctagtttcttgattggttcatctttcataaatcttgaatgatatcgagagaaaaaatgaggtgaaaaaatatagatgttataattacaaccactttttttctgagcattgtaggactcatagttcttgttatcattctttaatgttttgtatttaagataatctttttgctttaaataccggttctatcttctgaatctccgattcaaatccgaaccaatagccatgtccttcttcgtcaataggaagaaaacataaccggaggttctcacgatatgagccatatataatttcccaattatcgggaggaacttggcgttttgtctttactttttcagcggggattttctttaacgacataccggcttctatccatgcaatactgacttgtgtcacgtaatcgggataatgattcttgcagaaattatagaggataagtccccttttttccagactcaaaggagtgtcgatgacatctgtctgtattagatggtcaagtaactcgtgcaggaaatgcggattatccaaaatgagggtacgagtcagacttcgccatgtaggtgtattatagaatccgtctaaaagacgggacagatagtgggcggtttgcaattcttctacggaaatttttttagtctgcaaaacttcgtagggagggagaggagagtattggatgcctaactcttccgcccttcttcgcatttccgtgccgggaagtaattttaatgattccagttgtatttcccctgcaccatattcggcaagtgtacgaacgtcttcaaatatttcggataggtgatagagaggaagaccggctattaagtcagcatgtgtctccatgttcttaagggaacaaagatatttcagaccttgaagggcatcagataattttccgatacgtcggcttttctctaatacgggttcacgaaggctttgaatacctgcttcgaggtgtagcaaaccattaggtaaaatagcgagttcttcttttaattcttcggagagaagtgccgggtgaatttccaaatggaaacagatgtccggggcatattcacggaagaggtgaagaagttctttggctcgcttattattatagttgaaagtgcggtcgagtacacgcacatttttgatgccatgctgatggataacattcagtcgttcgcggattgcctccaatgaaatggtgcgaaccggtttctcacctccgctgacgcagaaagcgcatgtgttgaagcatcctcgggtagtttccagttgtacgaaaggcttgctccaattaaaaaaacgacttttctccggtgagacgagctgagagaagttcatgacacgggcaataccgttgtcttgatattggtctgattcgtccagataacataatccggatatctgattccactcatttacagggtgattccatacttttaaccaaattgggaatacttcttctccttctccccgaaacactccgttgacaaatttgttctttcttaagaaggcttcgttatttcctaaaaactccggaccgccgagtacgatgcagcaatgaggtagcaaagctttagcacgtgaaacgatatgcaacagttgctcgtgattaaatagccagttggtagcagcaataatatccggttgatggtgatagatttggttgactaccattccggtattttcgttgatggttgccgatactgtacaccactcaatggtagtgtcatctgctatttgagcatgtaatgcaggcaatgccagcgatgagtgcgcataggagctatttaaatcaagccaaagaagtttcatgtgtaaattttactattagtgggacaaaggtacaaaaaacttgcatcttaaggcatatagtaaaataaaaacgctaattttgcaataataaacgcaataaactagaaaattatgaagaatttgaaaaaatacgtaggtgttctcatgttgctgactttattggtcggctttacttcgtgcgaagatgatgaaactatatttgatcacatagtagggcgtacatgggttggtgatttaggattttgggtagataatagtccggtggaaagtggaataacctttaagagtaatggttttggtgtagatgaacaatggtattatgattgggatagagtagcggctgttttagatgtccgctggtggattgaagatggagatttattcttggattatggtaatggctatcctttattaatattagcagatgtttatgttgaaggccgatatcttacagggcgtttgtattcaaataatatagatcaaggaaccgttactttagaaatgagtaattagtgaagatctaaaaaagaattgtggaattggaaaaaatatcgatttttttatagggatattcctaaaataataaaatt

SEQ ID NO: 4705 - DNA, 30398 bp, Unknown
  gut microbiota DNA sequence
agaatcgccatcccggattgaagttatatacttgtcgcccgcaatcgggaagcggaataaatccggcaaccgatgtttcgggacggtaagtatctgctgcctgcccaccgaaggagaatagcagcagaaataggaacaaaattaaaaacggtcttttattcatagttttttcatttatgtaattcgtgcttattttttctatttttctatcattataataatgtctttctttctgttttctggtgatacctttaggtctgtcactttcccgtcttttaaagttgcttctaccgtcgtattacccggagcgtggagcttgaaatggacgttccattctttgggccaggcggggaacagaagtatttgtgctccattcgtttgtaagagcatctcttgaagtcctatcatgccgctacctccccagttgtggtcgggtgtccagtcatatcccggtccccagaaggcaggaaaacggtggggaccatccgatagctttgccagagaaaggcttttggcttcttcggtcagtcccagacaggccgcccagatgttgtcttgcttccatccggtgtgggaacggaatttgagtgcgtcaggatcatagaaataggtatcacgagctatttccagattttccttgcctactccgtagatgcgccagggaaataccgggtagagttgtggtgtctctatattgttgattcgttcccagcttttggcgggagaaatcgtttgtttccatactggagtcatggtagaagtctgacgattaagagaatccttgacttcgatatagcgtaatggaaccggaggaattgtttccagcatcttttgccacttttcattgttgtaaattttgatgtaagtctccaatacagttcgcagtgcggcgatggtgttgctggcgttgttggtcatcttgtaggtttcgcaggcagagccggggaacagtatcaggtgtccgtcgccatccagtgctttacgtccccgacgggaagcgagtagccgataatgttcgtcgaaaaaggtcagcgagctttcaatcaaaggcaaatacggggttatgtcggcatcggcataattcttcgtttccaaaatcatctggcaaaattcaagaatagtgtcccattcatattccagccacgcattgtattccagtcctttgtcaaaccaatccggacgtttgaaaccatattctgcgggattgggtaagccgaagttttctatctgttcggagaaacaggctccctcgtgttgccaatatacacggctgcggagttccgcattcttcaacatccggttatagaaattgaattgggaaggcatcatgtcgaagtcaccgcttttcagcattggccagtagacaagacgctgattctgtgcagtcatcgttcctcctccccactttcggtagtcaggagtgaatgcctgcttctcgtctatgtggcagggatcgaaggtgaacaaaccaccgttgaacttggtggggacactgccgtaagcattgcagcccagcatataacggaaaagagtgtagtttcgggtgatttctttcaatgcatctttcgcatcgctcttttctttatttccggcttctttttctactttgctgttctccttgttttcggtttcaccgatcgtttcgataaaactccgttgccagaaagcattccaccacaggcgggtttgttttttatcctgtgataccactttagacgatatctttccttgtggggcaattcgttgccaggctgttttcagaccttgctcccattgggtgacggtttccgtctgttctgtgtgtaacacaactgagaaatgatgctttttagaagctttcaaagaacgaaatccccaagtgcggtaatcggtcccggcatatacactgtctgaagtgcctgtatattccagattctctcctgacagataccctccgaaagtcagatttttaagaggattcatcatctgcgacttcacttcattcatcccttgttgggcaactgctatgtcaaatactgtctcttccgcattacgatgataaaacaaaaggcgtttgctgtccttttcggataaattctctaatgaaatgaagtcggcatatgttaccgtacctttcggaggagcccacttataagaacattgttgcccctctccttttctgatcagccgatcctggtatctccagttttcataaaatatttccgtctgcaaaggccggtcattaaccacttcaatgtgtacaaccggatgaaaaacatccgcccagagttgtacttgcgttcctccggcggagatttcaacatagccgtcgatcagctttaattcctgccggaaatcctttgcgtcttcaaaaggattgggagataaccggaggcgaaaacgtcccagcttcaactggcagttgttttcatcgaacgtaccgctcctgctcagataaaacagtatatccccctcttctacccatatgttcatgccgatatctcccccgccgcatggcatcgattcggaggagttccggctgggagtatcccagacgacattggcatgctggctccaaagaaccgacacgccaacgaatatcattgctatagccagataaaatctcttcatattctcaaattaccagttgtccgaacggaaagaccccaacggcagaccatcacaatatacatctccttccacataattctcaaatccataacggacagctaccggatgcggaactttatcactttttactagcattttgctgcgttcgatccatgctttcgccggatagaatactttgtcttcacctgccacctgaaagtttttcgattcgaaacagtttttaccgctgatccacatattcgcacgttcaaagctgacgacgatagtgtcattcttgatttcaatacttttgtaatagggactttctccgttcaccccctctactccgtacgtctttgttagtgcaaggagtgccagacgctctccggcagcctgtttctttgcgggatgaatacccttttccattcctgcatccagcagtacagccatgccgctgttagacacacgatgttctacctttgcctgtgcttcccgcagataggctgaattaatcacttctttacctttttcagtgataataccatagtcatagggagctatctggcaatagtagaaaggaaaatcaccttgtttccattcggcacgccagccgttaatcaatgtggcaaacatatccgcataggtatgggcacgattccagttatcttctccctgataccagatcacgcctttcatagtcatgccgatcaatggatgcaacataccattatagagtacggttggagtacggtttttcgatttgatatcagcttccgattgaggtatctttgcatccggaaatgctttcagccaatcagcagtcatccatgcctcgcaggcagaaccgccccatgccgctactacgagtcctaccggaacttctaatatttcattgaccagtcttccgaaataataggccgtcgcactgaaatcacggacactaaccggagccgcttctttccatgaaccgactacgtcgttctgtggggtaatggtagaagtacgttttaccgtaaacaggcggatatgaggatttttgctgcgaagaatatccatattggcattctctacaggttggttcttgaatcctttcatcggcatttccatgttgctctgaccggagcacagccataattcgcctatcagaatattattcagtgtctttggggttccatcgtcgaaagtgatggtatacggtccgccggcttccggagtggagactgaaagtttccatgagccgtttttgtctgctgttactgcatattgttttccgttccagccggtagtgactgttacttttttgttcggagttgccgttccccaaaggttggcattggtttgttgctgcatcaccatgccgtcagagaaaatagcaggcagtttcacttccgcatgcattgacagacaggcagcgagcagaaagcttgctaatactgtgcttgttttaattcctgaacttttcattcttatttgtttttattcgctacttcaaaattcaaaggtccgagcaatcctgcaggaagcagggtgttttctgctttccggtatttggcattcgtccatattccatcgaaaggagcttttccttcatcggcccctttgagtgcattcgcccaagtattggtcacttcgatttccagttcattcacacctttctttaaggctgccgtaatatcagcccgataaggagctgtccatatcgttccgcaatctatgccgtttacacggacagtagccagatcgcatacttttcccagattcagatatacttgttgggcttctttcactttacttttccagcggaatgttgttttatacactactgttccggagtaatagcgtatttgctcatcttcttctttgctccagtcaaagagttcctgtctttggatagtcttaccgtttgctgtaaaagtcacggtatattctgtagcttccaagcctgtctccgaaggttcttttactgaatccttcttttccttgcggcctttttccggagtttctttataatcttcttctgcagggtatacgatgaagacagactcattcggagctaacgttaaagtgatttccgtacgatagtttttttgttcgtaaggaatgtcggcggtaatctcacccgtcaccggattccagcattccggctttctgccgtcgatgcgcatactggcggtaaatgtacgtgtttcctcctgttggttggcgataaaataaatgtccccctgttctccttgccgatgtgtccatgcaatgtcttccggtacgatcagatcacgttccagaccgtatgaggagaaatcatcttcattatatggaagagaaggaatcagtatgcctgcttctttcagttcatttatcttttgttttacttccggagatagttctgtggggtctggattcatcggacgtggaagtggcaatactaatactttgtaactggctccacccggtaatgtcatcctaccattttcagctttcgccaaacggagtaacgcgtctttgttaaagctgtcataggcatatcctcgaagtggatttacccacttttcaggatcggccatattggcagaatgtgttacgcctacaggacgcacacgtaagggttgtccttcgtttgccaagcggattcgttcgctttccacccgctctgtaccgaagatgcccggtaaagaaggaactaaacgttccggcaatatcgaacgtcttggcatctcttctcctgtaaaaactgcaatatctaccactggatgcccgtattgcagcaatgattggcaacgggtgatgtattcacagaaagcctttgcacctttattccaccacgtctggtcacgctggaagaaaaggccgataccatccagagtcattcccggtttgcggtccagccaaggattatggacatatacatggaagaaaaggcggttgatgcctaaagcatagttgcggtccagtaaggctttcaacattcccggatgttcgtcccatgttccgcgtacttctgtgaaaccttctgcctggatgatattcttgccgtagatatgcgctccgctgatagcatccagcatatcattcggtttgtcgtgagttgggctgttcagccagaattctcccatgggaaggtctactttctgataatgcagtaatccgtcacttaccatggtaggcgctacgcattcggctgagaactggcaatcatattctttggcacagtcggccaagacttgatagaaaacgtcgacgaccagttcacctatcgttgtgcggacatcacgcagaatcttttcacttcgttcggcactctccatcggaatacctgccaacaatggtaaataaggcatcaggtcgtatccacggcgtttctggaattctgcggcaaaagtatcgctccagttctggcttccgcattcccaactatccacgtgcatatattttaatacgcggcgtgcaacgtccgggtttgtctttacaaatgcctgcgcaaaccagttgtcgaactgcttgcggacagcttttggattaaatttatcacattccagtccttttcctcctccggcagttgcgttcgtatgtccggtggcggtatgtcccatgcggagtagtttccactttcctttggggagagtagtcgtcagtgttctctctttaaaattgtcgctcggactatttttaaagggatctgtcaggttgataatctgtgaaagggtatagcaatcttgctcccctatttcctctttcttcgtggaggaagctacacgccataccagtccggctttgccttcccactgatccagtcgggcttcccggtgcaggcgcaattcttttattttcagattaggtttccattttgcggcatccatatcttcacttcccggttcactgccttcgggggtccagtagaagcggaaatagcgggcagttgtagcaggaattgcatgagtggaattttcatctgtattctgccatccctgacgtgcagggacgagttgtttcaccaaacggtaattaactccatcatcacttgccatcactttcaagcggtgtgcctgataattattgccactcagaatgatttcaatattgcggcaggtgaaaggctgttcgtattcatattggatatagcagggatatgatgaacggattactccggcatcatccatgttcacagtcttcttgatgtcaatatgatttcctgtggctatattggcacaggttattttagccggcataatgtctgccgcttcctcttttacaggcagggcaaataaagatatatcttcataaaaaccttcatatgcctccggttgcggcaagtatagtcctttgatattgccaccatcaacgattgtatcactccagactactttttgcatcgattctttcggagtcatccacggaccaccagccaatgcaaaaccatcacaaatatgcattcctaactttaatcccaggcggtcggcttcttccatgctgaaacgaaccatttcccaccattcgggagttagttgttgcgccttcccattgtattgtggcccttctttgatacctttgataggcatcagataagtgcctcccagtccggcatgtttcattgcttccaaatcagccgtaatcccttctttggatacggcgccaaacatccagtaccaaaaagtccaaggctttgcttcgtcagacggattttggaattgttcgcgaagtgaatgtgtttgcagagcattggcaggagatatagcagtacataccaataatgagattgcaaatatttgttgtttcagtcggcttttcattctaatctatatttttacttatagaaaagacgaagaacggactgttttgtactcactatattttccttgctcaaattaaactatttaattttttaggcagtattgctttctacaaaataagtctcatttcaccgcttcttctattcgggatactaactgcggattactgggacgtgccgcagttccgaaatcaataatctgcccctttctatttattaatacatagtaaggcatcctgtctattttccattgcttacgaattttctgatagttatctattcccaaataatcagtcacatgaacacattcaattccccggtttttcaatgaatactcattcaggcattcctcccattgttctttgggttcactcacacaaatggaatatataatcaaatcatctgtagagaatttgctgcgcaattgttttaaaggttccatttcagccagacaaggaggacaccatctggcccaaaaatcgaaataaatcacttttccacgattcttttcgagcacatcatagacaggtttcatgtatggcatacgtgttgtatgctttgagttctcatggaattcgccatataataaattgtcggaaacaggctgtggattttttagatatgatttggtctgattatagatctgcatcacctgtgcacgtagatgcgacattttaacgattgagtcaaactgtgtacgtttttcgtgaaaagcaagtgtgtcattagtacataaagaaccggctatcaacttagtatataaatactgattcatctcactctcccccattgtagccatgatctcttctatcgaaggattctttttatctctgaaagcgatcccataagcaatatatctttctgcttcatcagcaacatcgtataagcgtgccgagagtatgcctttagtatatagtttattgatttcaggtaaaagtgtatgataacggtccatctcttttctcgtttcaaacaagtatgacataccattgaataacagcgcataataataatcctgcttcagcaattcttcagtaaacagtactacatcttccattggcttgtacttcaccagatactcattcctacgttccaaacgaaaattataatccttttttaattcagcctcaaaatccttaacgtctgattccggtttcatattgtaattctgtatatagtaatatgcactttcagtgaacgccaatatctcctgattaagcttttcggcatcacctgttactttaggatgaaaaagatctttgaagtctatttctacatgtatgctgtctcccgggtggatataaagatgttctgcatagttgcggatagaaacctcccttaatttggcataaaccggaaagcggaaagagaatgaaccatctttttgtatgggcgaacgatactgatttcccatatctctgaaaaatgggataatgagagtcagttccttttcctgaggatagaaatcccggtttaggactttgcctgtaatgactgcttcttcagcatactcttccaatgagggattgcttttctctgtttgtgcagaagattcggactggaaattactctgggctttttgacggcatccggcaaacaacaaggtaattattatcagaaagtataaactgtgtttcattgtgtttgaatattagtatgttcgtaaatctaacatttaagagttcttgcctctaaatgtatgaaattatttttagaggcaagaacttttgaaaggttatctgtctcaattttagatatttcacattatatatacataatttgtgggataaacaggccgaatgctatagccaacgtacaaacttcctgatataccagttctttaccaattgcgtcaggatacaataggaaagcaaaataccaatcagccagggaaaataacccaaaggaagagccgtcaggccgatggaacgtccgaaagctgtgaaaggaataagaatgcctactgccataattaagaacgtcagccccataacaggccacgtggcccggctttgtataaatggtattttacgggtacgtatcatgtggacaatcaatgtctgggataacaaaccttctacaaaccatccggtctgaaacaaagtctgatgttcgggactgttacaactgaacacataccacatgaccagataggtagcaatatcaaagatagaactgataggtcctatataaatcataaagcgactcaggtcagatgcatcccatttgcgcggtttcttcagaaattccgggtccatacggtcgaatggtatggttgtctgtgatatatcatataataggttctgaatcagcaaatgtatcggcatcatgggcaggaatggcagaaaggcgcttgcaaacatcacgctgaacatattgccaaaattggaactggcagtcatctttatatacttattgatattaccaaatgtctttctaccttcaagtacgccgtcttccaataccatcaaatccttctccagcaagatgatatccgcactttcttttgctatatctaccgccgaatcgacagatatgccaatatctgactgacgcaaggcgcctgcatcattgatgccatctcccagaaaaccaactgtattaccttgctcctgcaatagagagatgatttgggtcttttgcaagggagtgagtttggagaataacgtagtgtcttttactgcttctttcaatgttgtttcatccatttcctccatttctattccggtaagggagtgcccggtatcaatccccacctgacgggcaatagctttcactacggtatcattgtctcccgacaatattttgactgctactccatgcatatataattgttcgatggcttcggcggcagaaggtttgggaggatcaagaaaagcaagatatccgatcaacaccatttctttttcatcttcgatggcaaaattacagtccttttcgatgaaacttttctgggaaaccgccaatactctcataccttgccgattcatttcttcactgatcttttgcgcttttattttcaaggagtcagtcaaaggatgtatctctccgtcgaactcggcatacgaacagacatcgagaatctcttctaccgctcctttggtaataatttgccgcttcccttgcctgtcttctataacgacagacatccttctgcgtgtaaaatcgaaaggaatttcatcgactttggtataggcattcttcaaatgttccagattcaactctcttacatgagagaggattgctttatccatcaggtttctcaagccggtctgaaaataactgttgaagtacgcgtgacgaagaatacgtttactgttgtcatcactgccgtctgcattgatatacttctccaacacaattttatcgcaagtcaatgtaccggttttatcagtacaaagtatatccattgctccaaaattctgaatggcattgaggttctttacgattgttttctttttggacatggcgattgctcctttagacaggttagccgtcacaatcataggtaacatttcgggagtaagaccgaccgccacagatacggcaaaaatgaaggcttcgaaccagtcacctttcgtaaaaccattcacgaaaaacacgaatggaaccataaccagcataaaacgaatcaataaaaagctgactttgctgatacctttatcaaaggctgtagtggcacgatgtccgaccagacttttggctattgtacctagataggttttatttcccgtctcaaaaacaattccttttgccgcaccgctaatcacattggaacccatatagcagatattgtccaactctatgacacttcctttacgaaactgttgtccctgtacttccggaaacttttctatcggttcggactcacccgtcagtgaagcctgactgataaacaagtcttttgaatcgatgatacgtatatcggcaggaaccatatcaccggctgccaggtacacaatatctcccggaacgagttctgttatatcgatctcttcttcctgttctccggcacgttttgccagacaagtgttttttaccatcttcattaaagaatctgtagcttcacttgctctccattcctgccagaaacgaaggatagcactgaataataccatggacgaaataatgattacccctgcccattcttgctctccgggttcagccatcaatacatccagaaacaaggatatgatggcaagtcctgtcagaacgcctatgaaaggattgataaacgttctgacaaacagtataaacggattctttttctgttcatggatgacttcgtttcttccataaatggattgtcgctcctgtacttctctcagtgttaatccaagctttgtagtctgcaaacaggaataaattgacttaccgggttgcgtggcaaccaaaaatactctctctgaattgaatgtgtactgtgatgaacgcagttttttcttccataccatactctctaatttttttaagttactaactgcatttattaattcgatgcaaaagtaaagaggacttcggaaggaaaccgttagagaatgattagagtggtattagaaaactattagaattttttagatatgcggaagttttaccacaaaggtagttccctcgtccttatgagaagctacggtaagttcgcctttgtgaaggtggatgattttctgtgtcaaaaccatacctataccatttccgggagctatattcttgttttctccccgataaaacagtttaaacaggttttctttgtctgcatcggacattcctacgccattatcagacaagcggataatagcccattgttcccaataagctatcaggacggatgaagtccggttggaagagtacttgcagttgttctctaccagattcacaaaggcagtagtcaacagatagctgtttccgattacggtcagcacgttatcttcctcggcttcctgctcaaatactaattcgatatgataatccggatgggcttttaggactagttctctggcatccagcaacagttcatccaaccggacctcttccattgtaatctgttccgactgatagtcggcttttgcaagattcagcaatccgtcgatcaggtttatgatccgtcgggaatcttgcagtgcattgctgatggctgcctgatattgtccggaggttcgttctttcaacagggccagatccagttcggctgtaagggctgccataggtgtacgtagttcgtgagatacattgctgacaaacatcttttgcgagttgaaggacttctccagacgttccaacagtgcattgaatgtaatactcagttctcccagttcgtcctgttcatttttcactggcagtcttttgtcgatatgtgaggcggtgattttctccgcttctttcacgatattgcgtataggctttaaggtgcttcgggagaggatatatccgacaaccgccaacacggtcaatcctccgataaataacagaatgagcatatttctcagtgcatcccggttagcgtatccatagccatcataggcagcggcagtgacaatgtagtcttgcccttcaaacggatacacaagtcctattgcctgatattcgtccacatagaaactgatattctttcgtttcagaatacgttttaccatctcgggtgtttccttgactatgtcgttttgaagggcatcatgatacagtattttaaaatctgtggtatagacggctacctctacttcattaataaacttctgattgttcaggtaaatagactgcatcgtttttgcatctacttgattattaagaaataagtgagctttggttatagcttcactttgcaggttgcgaaagaaggcattgctgcgcgaatgctcgcttacgtaatagacagctacaacaaatgcgaagaataccgcagctgtaatgcccgcatattgcagagtcagcgttgtccggattttcataatttgtcagtcagtatgaaacccatccctgctttggtatgaataagtttcggttcaaagttacggtctatctttttgcgaaggtagttgatatatacatcaataaagttggttcccgtatcaaaatgcgtgttccagactttctccgctatctctacccggctcaatactctttcggcattttcgaccatatatagcagcaggttatattctttcggagaaagtttaatgggaacgttatttcgttctacgtctttccgctgaagatcaatgcgcagatccgcataaacaagttcctgcggtaactccggtacatttcctgagacacgttttaatagaactttgattctggcattcagctctctgaaatcaaagggcttcaccatatagtcgtctgcaccggcatcgaaaccgtccagcttatcgttcgttgatcctaatgccgtcaacattaatataggaatacggggattggacttacggatttctttcgtcagctcgaatccgtccatcttaggcagaacaatatcagatataaccagatcgaacgtatgtgcctgaaaaagccgcagccccattaatccgtcataagctaccatggtctgataaccattttcttccagcccgttcatcagcaaacttgccaccctgggttcgtcttctataattagtattgtgtacataggaaagaactcgttaatctgaatctataaaacgaaacaaaaataatgattattcctcacttatgactcttttaaaccattttatatttgctatatttacattaaaaaaaggtacccaacgcaatgtgagtacctttttatttcatttatttattccataaaccggaaaatgattcgtccgctctgcggaccattcacccatttaggctgcgatgacgggccacatagatctgtagaatttactttattacgtacaggaggaatcacattcaagacagaaattccactttcaggaagcgtataaagtaaacggtcacgaccgtcacgcggctgatatactccgatataagcatccggagtttcattggtcaggctgatagtaccctctttcgtgcggatgttcatccaggaaacactgccaaaatatcctttgaattcgggatatgtgaaagtttcacccggaataggatcgttatagtcgttttcccagacatcatattgcgtgccatgaatacggttctgccatacacgatagggccccgctcccagccagcgtttactgatcacctgatcttcgggatagtcgaagcagattcccattaaatctaccacgccggaaaaattgtaggtataatccagcaccgcttctccatttggattgattgtccattgcactttatccagattacccagtttataattggcagtaacaatcagattgcctccgtcttcttttacatccagttttgtgaatacagcagcatcagggaattcgctgtaggtacgatccttttctttcgctttttcgtcatcgtgattataaaactgatccaatgagcggtcggcacgacgggcaccgatgaagcgaggtccgttggcaaagctgatcttgcgattgtttacggatacacctttcagctgaccgtctttctttgagaaaatgaaagtatggttcttcgcttttacggtaagttcattttctgtttctgtagaggttaccttattagataagggagagagcacttcattagcctgattcagtttgttcacagggaaagtccagcgccaaagttcatgaccgtatcggtcgatggctgtgaggaaaagggcatcggcatccggaaggatcgttgttttaatatccagcacacctgccgaatgggctgcaacatcacttccttgtacttccccttgtttcagaacttgagcagttgtattagaagcatctgttgcggtagggaacttcacctgtttccaaaggaaacggcaagtgttcagattcagaaaatcataacggttttctacagagaacttaccgtcaaactgtttgtcgacagaagtattcatgatttgtaccggactccataactgcttgattgtgtagaaactgccttccttttcatgatgtggtcctacaataccgtcagcgccgaaatttccttgattatcaatgaatccgtccatatcgacacgcttcactccttcgtccgccagtacccaaaggaaaccaccgatacagcgggggtgtttacgcatcatttcccaatagtcgtataatccggcaccatgaccgccatcatacaaaccgtggagaaattctgtcggcataaagatttccggcaagcgcatatagttctgactttctccgtaagaacggtaatgcatggtttcaaaaccagagaaattgccttgcggatgaatcaccggacgtttctgcggatcgtacttgtgaaattctccatcgagttcggtattccatcctttttcattaccattactccaccagataatagacgggtggttaacgtcacgctctatcattccttcgatcagacgtactccggtcggagtatcgtatttaccatgccagcctcctaattcatccatcacataaagtcccaaagaatcacaagcttccagaaactccggatcagccggatagtgactcagacggacggagttcatattcatgtctttcatcagaagaacatcttcgatatttttcgctttacttaatgtacggccactttccggatggaagctatggcgattgacaccacgtaccataatgcgtacaccgtttacgtataatccgtcactttcgcgtacttcgatggtacgaaaaccgaatgtttctgtctcgttgtgcagcacttttccgtctttgtccagcaaagaaaactgagctttataaagattcggcgtttcggctgtccacagagccggatcagagaccttgagctgtaaagaagtccagtctcctcccgcttttacagggacggtcgtttcagttagttttttgcctttattgtccaaaatctgtgcccggatactcattccgtcattagacagattggtatagcaattggcacggaaggaaccatccatttgcgcatcaatggcgatatgacgtaaattaatcgcaggttttacttccagaaataccggacggaaaatacctccgaagttccaataatcggcacgtcgctcggcaagattcacactggcattttcgctttcctttgaaacggttacttccagcagattcttttttccatacttaaggaaatctgtgacattgtatgaaaaacgatagaaagctccctgatgtttcgagccgactttacgcccgtttactttaacttcggtatctgtcatcgaagcttcgaataccagatttacctgctgcccgcggaacttctcggggacctcaaactcgtacttatacattcctttttcatcggcgatgccttcggggaatgctttgccataaaaggtgattccatactgataagtgccaaagccctgcaactcccagcatgacggtacaccgatcttcgtccatttgccggaattgcgtccgtcagtacagaagaagtcccattctaccatatcatcacatccgtgaccggaaaggtattgccgttccgtttgcggaagggtttgagcagccagagtagttgccaacgccaaggttgataataaagtggttacttttctcattgttacttttattattgtgttagttactatttatttgtatcaattcttattttactgcttgctgatgcgtatatgcagcgtatgttcttttttctcaatagcatacttcttcagtacgcccggtccgcagctgctattccctaatccgagcacggctgcgtccatactgagaataatttcgggacgtggcttcagattgcagtcatgagtttctttatataaatcctgtgcagtataatgcaaagcagaggcagaaaatacatcctctaccgcatctacacggatacctttattccgtttgtctgtcagcgtaaaaaattgtacttcttccttatttccactatcctgcggacgaggataatgtacatactgttctgctaccgttcccttccagagtcctattgcagcagatgtcttgcgatcgggataattatcctgcggtcctctgccataccatgtaaaggtattataggcaggagccagacagaatgcaagccccaaacgaggcaattccggaagtactccttgcggtaagaaagttgttttcagatcaatgactccatcggaagaaatggtatagacggatgtcgttgtcactttgccttctttatataaattagttgtccggatacgtactatgactgccccatctgcacgtacttcatgatcaaaagactccagactaatcagaggatggtccatggcatgcagtttccagtcttttgccagccagtttccgaaactcttgtcattatctgtcggtgcacggaatgcttgtgtgacgggctgaaccggaaaatcatccggataagccaatatttccttgctattgtacgtaagggaagtcatacttccggttcctttcttttcccactgaactgaaaagccgcgtccgctaaccgataaagatttatcatcctcttttacttgcagcgctcctttattgatcagatcggcagacaacaaatctcctttctgtaagcagaattgttcccaagtaacttcatgaccggctttcgcccaaagggcatcagatttcaatacgatgcttacttttagctgacaatcagaaagcgtattcgttgagttgctgttgttgccttttctgtttaaagccttcttgtccgataaggaacggaaagctggtaaagtaattgtttcactctcacccggagcgactttcggtaatgtgatttctccctgttctttctgtttaccatctattgtcaatgtccataagcagcgatactgagataagtctatatgatgattcctgtttgtaacgatcaattgtccattgttgacggccaactgaaccggtgcatatactttctttacttcccaatacttcggagtcgtctcacgatcactcatcaatagaccattaaagcagaaagctttcagattcggcttatcaccgaagtctccgccatacgccaccataatgcgaccatcaggcaattctttataaattccctgatctacccagtcccatatgaaaccgcccagcatacggggattgctatatatttcatcccaatattctttaaagttgcccaacgcatttcccatcgaatgggcatattcgcttgtcattaccggacggtcatcattggtacgttccgctatttccaacagccgttcccaacgtgcattttccgcgcgttctttgtcttctccttctgcaatgcccggattcagatattcttgtttcacacgggtatagaaacggctgatcacatcgaccgtcttcggatcaggattgccatctactccctgcgcaccttcataatgaacggggcgtgtaggatcaaaatcgtgtaaccatgcagaaatagctgcaaagttcggtccgtagccgctttcattccccatactccacatcacgatacttggatagttcttatcacgttctgccatgcggactgcacggtccatgaatgcagcataccaatcgggagtacttgccagtgtcccgcgcagaccatgctcttcgatatccgcttcatccatcacataaagccctaaactatcacagagttcataccaacggctcacattgggataatggctggtacgaacggcattgatatttgcctgtttcatcagcagtatatcctgaagcattctttcttcactcattacgcgtgccgtccgtggatcgtgttcatgacgattcacacctctgaagcgaaccggattaccgttaatcagtaattgtcctttattgatttctacagtacggaaaccgaccgactgctccgcctgttctatcacttttccttccgcattctgcaaagtcaggtgtaatttataaagatagggtgtctccgctgtccatctttccggtgattttatcatggctgacagacgtcctgtcttacgtggtccacgctgcggataccactcattcatccggcttgctttatgctccagatccagtatttcttccacctctccctgtaactttactatctcctttccacttacgtctttcaacacagcttgcagggtatatccttttccggtcatacctctgtatacactaaattgcggatcgatctgcaaaataaagtccttataattgccggcagatgcaggaagagtgcgtattgtataatcacgcatacgaacatcaggtgtatgtatcagatgaatactacgatgaatgccgccaaaacgccagaagtcctgatcttcgagataagacccgtcactataacggtacacttccaatgctatctgattctcaccagtcttcagatagtcggtgatgttaaattcacttggctccatactgccttggctataccctacccgttcgccatttatccagacatagaaagcactcatcattccttcaaagcgcaaaaaagtctgtccgtccgcttcccatcccacaggcaaaacgaatgtgcgccgatactgtccgaccgggtttcgttctttataggtcgtatagtcagctttcggctctcccattactcgcggaggatctatcttaaacggataacctgcagatacataaataggcgtgccatatccattgacttcccaattggcaggaacaggaaagtccttccagtctttatcattaaaatcagtctgatagaaatctatgattctttcgcccggaacaggagtccatcggaacttccatgttccgtccaaagacatcgaacagtctcctttctgtacggagaaaggagtaaaagcagcccgtgccggttcacgattaatctggagaacatgatgattctcccagtcatgcattgtttgtgcctgcatcgggcaagcgaccaatgcgccaagcagtaatgtatatattttcattcgttcttttttcttcataccaagaagacggacgaaggggcattttgtacccctttcttttacattaatattgaagaataataaaaggagaaacactctatgaagggttgtcttgcttcacacgcacagtatgagcatacgattgaagattcggaactaaaactgtaattaaaataagaatatcaattattaaaatgcaaacatcgttttaacgattaaggtcttgcgaattaaaatactccttcagacaggagtaaaaacatatatgaatatcgcattatcttccgggaaatgtttttctttgttatacattcatgtcatttatctcatgttctgcattaaaaaacaaaagaaatggaagagaataaacaaacactttacaatgatgagttactagatatcctgcctgacggagttattatatttaatataaatggagaggttatccagcttaatcgccaggctcaaaccgaacttcatgtccattcatcagccaatgagatgatgcctcttccaaccaatatccttttcaaattattaaataataaagaagatattctttctgtcatcttagagaagattcgtcagggtgaacaaacttattcacttcctgaacatactttcatgcaagaacaggtggattatacacaattcccgatcagaggtgattttgcaacgatcaaggaagatggcaatctgaaaaagatcttattcttttttcgtaatatcactgtagaactgacacaggagtatattctgaacacagccttacaaagaaccaggatatatccgtggtattatgatataaaccgaagtgagtttaccctcgacaaccgttatttcgaacatttaggtatttcggccggagaaaacaacactctgactatggaagaatacgtaaatatgattcatcctgacgaccggcaagctatggccgacgcctttattgtgcaacttagcggcatggaaacgttcgataaatctgtccccttccgcttgcatcgtggagacggaacttgggaatggtttgaaggccagtctacttatattgccaatatctcagggcatccctatcggttggtcggtatctgcatgagtattcaagaatataaagacatagagaataccttaatcgaagcacgtaagaaagctgaagaaagtgaccgtctcaaaatggcttttctggcaaatatgagccacgagattcgcacaccactaaatgcaatagtcggcttctctgatgtaatcggttccacttatgatgaattaagcgaggaagaacgtgccgattttgtgagattaatcagtatcaacagcgaacatttagtaagactgattgatgatgtacttgatttatccaagattgaatcaaataccattaaatttacttttactgactgttctcttcaatctctcatgatggatatagagaaagaacaagctatgaaacctatatccgaaatagagatcagagcatcatttcccaatgaagatgtctatattaacacagatgctacacgtctgaaacaagtcgtatgtaactttattaacaatgcccgtaaatttaccgaaaaagggtatattcattttggttatgcagttgacccagtcaatgcagactttgtgaatatctttgtggaagatactgggtcggggattcctcaagaatgccaaaaagaaatattcgaccgtttttataaagtagatacttttaaacaaggaaccggcctgggactttctatctgcaaaacgattgtggaacatttgcaaggagacatctccgtagagtctgaaatgggaaaaggcagccggtttatcgttactcttccattcgaaaggcagacagaagattaatgccctctgtattcctgcggagtgacaccggtatgctgcttaaaaaatttattgaagaaagagatattgtagaatcccaaagacaaagcgatattcttcactggttcattacttgactttaaacgagacttagcatccatcagaatgacggaagcaatgacttccagcggggtattccccgctgcctttttaattgttgaacaaaaatgaggcagactaagtcccaaatgatcagcataaaaggaggcaccatgatgaactgtataattcttcatgaccagttgcaggaactcctggtatatctcatattttcttgattgagtagataaataccgattgctctgtagcttataaatctctgttgctccctgaataaacatagtgagtacagcctttacgatctctttattggccaatgtcttggcagaagcatacgcaagaatcaatgactcataaaacatcttatagctacaggcttgcaatggagacaaattgataaccggattttctactattatcggaagcagatgctgggtggacttcatcagatttatattttctatgaactgagatgaaaagcctgcataataaatatgaatatcagatgaaaactcatgaatttccatgaaataattaggtggcagagtgattaaatcattttcgacaatattatatcgttctccattaattgttgcctgtattgtccctttcacacaaagtatgaagaatcctgcctctattttacaatgaaaattcttatacccattcagtaagtttatcccaaatccttctcccactatataatcaactgttaaatcgtacctcggtatatcgctttccatcgttattttgttttttatttcaaatatagagattatttaaaatctacgctcgaaataattaaaatccgactatcgaatcataaaaaaataacatatatattctatttataggaaaaaggtttcaaaataagaaacgggatgcagaaagctatacaagcttctttgcgtcccgcttttttactactattgcaaaagttcagtctgctaacagaattattgaatatccaaggcatcaaaagccagaccttccatattttctgctgagagtaatactttataatgtccggcgttgataaaagttccggtggtggtactcatcattttccatttgtccggtgtctccgggaaggtcagaatgtcttctttgagcactactccctttgaatcgatgaacttcattaaaacaggcattggttttccggtagtattcatatatttaaagcgaagggcataaacctgtgccagtccggtagagacattccattcaatactgttaccttttcctttctcaaagaatactcccgtttgcttacgatgttcttttttacggaatttgcctttcagggttgccgcttcagcttcatacgctacactgatacgggcattcttgtcttcgggaagcaactctttcggagttttttccatgacttctttgccggccttctcccaattccagtcggatgcggggaataaagtcggttgcagatttgcttcaacagaagcaatggcaatacctgaaatcagagcctgtcctgctttcacttccgggaaatgaatcttcaatactccaccttttactgtagcgtaaaccaccttcttacatactccgtcgtgaccactctctgcccaaatatcaagatcatccaatactaccgagtcattcactgccacatcgaagatgcgcaacccctcacagtcggtggaagcactgcctcccgtcccatgccaaggctctgtgaaatagagttcaatccgatatgttccgtcagctaccgggaaattgtactccaattgatgacgtccaaaacggaaatgctggaacaacttccagtcacggcttccccgaatcggatcattcgtcgtacgctgactggcaaggtatggattcaattctttaaagttcgctgcccatgaacgggaataatgggtattatcctgcatccataactgaccgaaactatctgtatagtcgtctcctccacagttaatacggtacaagtaattatatccgtctttccctttcaatacaggtttcgtattctgatataatacgtcaaagtggggagcttgctccagtccgttgagtacaattatgtcctcggcgaccggtttccctttataatatcctacagcacgaagtacattataacgaatatcccgattctcccacatgaagtgggtgcctgttccattattctttttgcgtcccagataagccactttgtcattgaccatgtcgttataaagcaatacggaatcacaattgctgtaagcctcgatagtagcccgacgacgtcctttctcgaaacgatccgtccaggtatgtgataccagatataccatcgggtcctttgccgccggcacatagttggcacgatacatataatatacatccagtggttcttcccacggagtcaccagtcctttatagttgaacggacctactttatctattttccggaatgcttcatccggctggcgacgtccgggattgtcgtggctgctgaaaatccattggaactgtccgcaaacactgtctttggcctgttccgccaaacgaatctttgtttccatcaactggcacatacgactttcgctccatactccattcacttcaaattcgccgggttccgtatgcagatcaatacttctccatgcaccatattctccattcagcaactggttcttctgcgaaagttcctttccgtatttcgtaacgtctcctccatacgtgccgctccaattctgaattacattccagtcagttccttcaccgccgttacaggtggtgatgatacgcatcgtacgtgctgtcgggtccatttcgcgaatgatttcactgcattcctgtgcaaattcacgaggcaatgtactttcattctgcaatccccatatcactactgacggagaattacgtcgttccttcacccattgacgaagcagttttttaaagttctctcgaaactccggtgtgtcataccatacatgggcagaaagttgtgtccaaaacaagacgccttcttcatcccaatatttctgataatcgagatgatggggctgatgagcatcacggaaggcgttgaagcctgccgcacgtatttgtttcactctcgcagctacctgctcccgactgaaggcatgactttgcccgaactgatgctcatactcgcatacaccattgataaagacaggctttccattcagatagaaacgcccatcttcgtcatttctctttaccggccaactgattgtacggataccgaaaggcgtagagatctcgtccgttgttttggtatcacgtttaatcatacttgccaatttataaagatagggattctccgtatcccataaaacaggattctctacaggagactgttgacgaatcaccttcatctctcccggtgccaatgttactttctctactagacggaacacttgtttaccgtccgcattactcaacttattgactacttctattgtctctgtggtcttaccatagttctttacttctgtctcgacaaagacattagccgccttttcgtcattccagatgtgtactccgaaaggttcaatacggatctcatctgtggcctccagcaccaccggacggaatatacctaacggctgagatccctcactgaatccccactccgacgaacagccaccacatacccacggcatatcggctatcatttccggatgctctgcttttacttccagacgattcgttccttgtttcaatgcatcggtcacatccagcgtcaacgtggtacgtcctaccggataacgtccgaaatcatgtccgttcactttaatagtagcatacgtacctaccccctcaaaacggaggaaataacgtttttttaattgagaattgacagttgacaatggacaattatcgagggagaagtctttcacatacatggctgttccgtgcaggttgccatgagtcagttggcgataaccgtaatagtcatcccaattatgaggtatttgacaattaataatcggggattgatgattgctttttgaattgtcaattgtcaattgtgaattgtcaattaaccaagttttccagccttcattcagttcagtgatcatccggcgattcttcgtttccggcttcgggaagcgaacggcagagcgtcccatcggcttacttgtagcaacagcaataccacgctgttcggcattgttcaccgcgcaataaaaatgataaactactccgtcgtgtttgatcacatagcttttatgtgcaaataattcatcgtaattcttagaaggaataatcaaatcagttccatgccagtctgtccagttgacgagatcataactagcagcaaacgtattaaaggctttatacttgcgtgacggttcaaaagctgagaaataaaacatcacgtacacgtcacccatcttttgaatatgagcatcaccggtgattgttccgtccgcttcgtgtgcaaagaccggattaccgggataacgtttccaggttttcatatccttggaaagtgcgattcctacccgttcaccctttaaatcagtttccggatgacgtcctcccgcattgtaaaacatcacaaacggggcacccagtgttttgtctttatcccagtaaacggtacttttatattgagtcaacttttcccaccactgggcatctttatcatggatgctcagaattggcttgtccagagattcccattcatgagcggtggaaatatctcctttggtagatgccagtccgacaaagagtggtgcttttacagcttcataacctgtaccttctccaccgatataagtcatccagtggcggcctttgtaggtctgaagttcgtagcttccaccccactccatatccggcagcgcagggaatcctccacgctgattacaatcccatttaccgtcccgataagaaagtatacgtcctaaggtacgccaatcaagcagattatcactttctgcaatccaggtttcgtatccacgaccatccgttccggttttaccattataaacgacataagtcatcagccacttgtctccctgacgaaagacagtaggacaatcaatcttatgataattgtcggtcggggcaacagcaagtccgtacttataaggcgtctttacctcttcataaatctgctccatccgttcctgcgtgacttcacgttgggcatacagtgagcagcatacggcagctatacttaaaaatgtcagtaataacttcttcattatacttctgtctatcatctttttgttgagttgccgctatttgtttcaagctttggaacaaatggtttcaaggcatgaaactaatagtttcaaagagagaaaccaatagtttcaagccttgaaactaaatagcggcttacagcaatcgttcattagtaaaacaaccagtccatcgtttcttcgtctccggcaagtccggcattacgagttttcatatccgcagccgtaaatccaagaacctgaaggtagcctttgggcaacatcaacgtatgttttcctgccggaaagctatatgcgtgtacatttgctaatggcattccattgatatggattgcattggtcagtacaggttccgcctgaccgtaatcgttggcagatgcatcaatctccagtttcggagctttggcatacttcttctggtcgtctttaaagtaggctactaatagtttgaccggagcatttgtttcaaaagtaatgcttgttcctttttcccgttgttcatttccattaaagcggaatgccttcattcccttcagttcaggagctattgcttctattttgcccggaagatctgtgaacaaggaagttccttcattcagttttactgtcggataattcgatattaagttcacatccgcaggagcccaggcagcgatctctaccgtttcagtcacggcattgccattttgcttttctttcagcatggcaaggttcgccttgaagttctccaattctttttcgtagtgtaccagcagttctttccatgtcttattatgaccatcgtctccgccgataggaatacggcgttgggcagtctgcatactgttggcatataaataatgctcgtctgtcagttccaccagtttgcggtaatgttccagactttgttccatcagagggatggcttcttccagattcttcatgtcttttccccactgatagtccaataccagtttcgcagctttcactttcagattaaacgcataggcaaactcacggtaacaatgcatatcattctgcaaacgtgcgaattcttctttgttggaggagatggaaccggctgccttgtcaatcgctgctattgccttatcaccgtgttcaatcacctgagcaacaatatccagcggcatctcacctacatgaggctgattcttccattctttctctacaaattcgatcagtttctcgccttccggtccgcagctttcatagaatcccggatagatggtatatttgtacggattgacaagctggctcataaacatacccaacaataacgtctgacggtttccttctgtgataccaaaacggcgtaataacttcggagcaatttctccgctttcttcataagcaatgcgaatattgcctgcattctcgtcggatgttccgtagaactgtcccagttgatgattccagtaaccgatctcgtcagcacgatcccgatggctgttccatgcataacgtccccaggtctgataccagatccagtcgcggtccagttgaaattcccgttcgccatttggcagtttgtcggctgtatacggccaatcccagtacgaagcctgcggataaagatgcagtgcattggcaccgtgcacgttgtgcatcgcttgtaccgccttctgtacaaagtccggagagccccaacggaatggttccagatttgccaggatatgtacattactgatatgaatagatcctaaagagctcaaatccgtatgaatcttcgaccaggggccacgaggctcgtaagttgtcagtgattcaccattatacttatgcatcgtataaagattcttatatatcggcaatgccgcatccattaccagtttgcagtccgtatcgtgtgcgcgcagcaaaagaggcggttcgtcggtacgtcccaatgcctgtaatccgtctttaacacccggaatgatggtctttgtgaaccattccacatcatcttctaccgtacacatggcttctcccaggcaaaccagcagtcccacattcggatatttctctataaatgcagcaatacttttacgggtatagtctgcaatcagaggagtaatgggacggttacggtcctgcgttttcagtccataatgctctgcaaatggtttggaaaggatgatattgtagaacatctgtatcacgaagataccacgtttgtccgcttcttccgtaaggaaagaaaacatctcttcattcttcttgaacgtctcttcatctacttccagcgcaaacggataatcttccagtttgactaacgatgcaaacggatgaccattccacagatacagggaattcatacggttggctaccagcatatcaaggtatttaatccattgttccttatcataaaaccaagggaaactttccggagtatacggatactcatacacaccgtgtcccggcaggtaagtcatcttctgcaaaccgacacaagcgccgcggagcaccatttccggaccgtctttcaactcttccggaaagtttagtttgccctctgagtcgttcacacggtctatcagttcgcgacacccgtagattactccgcttccgtctctgccgcttactcttgtcagattgccggtagtcgtaatatgaaagccttctttcttaagtgtcgtatcattcacttccgtcagcagaatcgtctttatttcaggatcggagaatgtggtatccccttgttgcatcattacctgataaccggctttatccaaggtagtctgtaactgttccgcactgaacagaacgcggtttgacgcatccggcggagtcattattttcacggtttgcttaccacacgcagctaataaaagggtgcatgccgcaaacatgaacaatttggtatttttcattcttctgatgtatattataaaatgtataatttcgtccttttataaaagaaagacgaagtaag

SEQ ID NO: 4706 - DNA, 379 bp, Unknown
  gut microbiota DNA sequence
aaatggcgaaaatgggatggtgggaatcagatgtaaaaaatcaacagtatatttgctctgattttatcgttgatttgttaggacttgaaagccatcgaattagctttaaagagtttcaccacaggatacgcgaagaccatcgtatgcgtcttagaaacgaatttatctctcattcaaatcttgaaacttatgagcaaatgttccctatccaagctaaaaacggggaaatatgggtatattccaagattagtttcagaaaacctgataaggaaggatacagagacatattcggttatctgcaatatgtggacaaacctgcggaaaacagatgcggaaacatcgacttctttcatgtaaacagtctgctttatcagcaaaa

SEQ ID NO: 4707 - DNA, 1322 bp, Unknown
  gut microbiota DNA sequence
taccttagtggtagagacagatattcccgtacataaaatgagtgcaattctctttgaactggaaatgaagggagccgtacgggtattggcaggaggagtttatcaattattataaatctaatgaccaatctaaaacaatttgaaatgaaacgacatttttgggcattcatggcaatagtatgcctgttagccgtccagaacacacaaggacaacaaatggttcctgcacagaaaatctccgcaacacctgccgccggcgcacaaatgactcttgcgcaagctgatgggattgcttttcgtgaactttcttttccggaggctttaaaaagagcggaggtggaagacaaacttctttttgtcgactgcttcacgacttggtgcggtccttgcaagaggttatccaaagtggtttttaaagattccttggttgccgattattttaaccgtcattttgtgaatctgaagatggacatggagaaagatgaaggagtggaactcagaaagaaatatggggtgcatgcctatcctacccttctttttattaattcaagtggtgaagtcgtataccgactggtcggtgctgaggatgctcttgaattgctgaagaaagtgaagttaggcgtagagtccggtggactttcgggacttaagaaacgttatgaagctggtgaccgtgacttggcttttatctcaggatatatcaatgcgctttctgctgccaaccgtgagcaggaggcaggacaggtggcagctgatttcctgcagggaagagagcagaaaatgctggaagatgaagattactttttggtattctattactatgtgcatgatgttaactcttccgcatttcagtatgtggtaaaccatcagaaagaaattgctgacaaatttccccgtcagggtgcttctctcgaccgcagactgctcgaagactggatagccggttcatatgcctacctgaaagtggacgagtccaatcactgtacatttgatgagcagggactggatgcctacgtggcgaagatgaaacagatgaatgtggcggaagctgacatgataggcgagagtctgcgcctcagcagagacggtataatgaagcaatgggattcatttgtgaaacgtggcgataagatacttgcttcgcacaccattttgggtgacgaagggcatttattgcaatgggtgaactggctcaataaggaatgtgcagatatgtcattgcgtgagaaagctgctcagtggtgtgataaagcctgcgaagaattgataaagaagaatgaggagatcaaaaagaacttgcctcccggagctattccggccat

SEQ ID NO: 4708 - DNA, 3258 bp, Unknown
  gut microbiota DNA sequence
tttctattcaaaagagagattttctacatgttctccaacaaagataccagccatatctccggttttataccatttcggcttcccaggcatgtcgtctgtaatctttcgcccattgaccacaagattcacaaacctgataccagatatcttgtgattctcatcataccctgcaatgatcgacaagttttcacccgatccattgtaagtaacatccttaacaagcacattctgaatacctctgccggtagagacacaatacttcggattgaaactgattctgaaattcacaagctgtccgttacgaaaatcttcaatccgaatattctcgaacgtaatattacgcaccaatgtattgtcgcctggatttatagccagacatccctgataatcaatctgtttttctgcctgatcaagaatgtcgatattcctaaaagtgacgttctgcaccgtatccatgccgttcggatctccatgtcctccgatattgattggatgagccacatcagcccaaagtgtcgcatttttcaccaatacattattgcttccccctttaaatccttgcgtagaagcataaactgcggcacagtcatcactattacgacagaaaaccccatctaatatcacgttactgcttgagaaaacatccattccgtcgccccaaccataatagctgattgatttcacattcgtcaactctaccgaatcgcattgtcctatggggagttgcgaaaccacaattccgtctatcctgacatttttagaacgtctgacccaaacaccggctcccctgccatcagggtgtacctcgcctctcccgaaaatattcacatcatgtgctccttccgtgaatatattgccataaacacgagctcccccatcgatataaacagtagttcctgaggggacaaatagagtatcattaggaagattatgcacaccgggaccaaaataaatcaaattggaccctttttttttcttgagagccctttggatttctttatcggaaggacgaaatttatcaatcggattcgcaaaaagatgaagattgtgaaaaatatctccattgacctctactgagagattgcgaggacgcgaaagtgagaatgtcactgtgtctccaacacaatccggtgttatcttatagcttaaaggacgtactctcgcactattgactctctctttgttgctgattactcgcacatctaccattccgtcaaaatcgaaataagcaatggaggcaacctccacgttatgccctttttcatcaaccctatcaactttaacaggataaacgtcaacgggcaaccacggtccgctaccctgacgcacttccacagaaaaatcgtttaaggttttcaccccgaccccagcagggtatgtgactacctctgcgttaagcgaatgcatagccaataacgccaatgaaagaagtatcgcttttggataattcatattctttgattttaaatttgatattgaaatttattaaacactctaatttgaatacgttttgactataaaaagcgcccaacaaaagaatgaatatttttacttttataaaatagagaaataaagcggaaatatgtaatcacagagagaaataaatatttcaaacggtaaataacaactcactgaaacgcatcgtaacgaactaatcccagtctctcttaaaattaatttgctgtatgcaatcatctaatgctcggtttatataaccttattcgtctgacaactgttgaactttcgtctgacaactgttattctttcgtctaacaactgtcagacgaaaaagaaacaactgtcagacgaataaaacattgcagcattaatcttacatccattaaacataaaaagtaaatctacgtaaactcggaactagttcataacggtgcaggaacgaacgaatatcgggcaacggagtaaatcaaagcagcacagaaaagatatggaaatctccataagaatacaaacaaagaaaaagaaccacctaatgaatctttgactattccttttcgtatctttgtggaaagtcgtatcaaaaaggtacgaatataaactataaaacttagaatgaaatggaaaatattaccggacagaacaacgaatttacattaatattcccacataacagaattgattgcacttcttctcagaatgacaaattcaataagattattaatcaggccaacatcacaatcacaggaaacaacaatcgtatctcaatgtatttcgacactgaagaaagtgcggaagaattgctgcttagcaacggatttctgctaatcgtaaaaggagataataatatcgtaaatatgggaacaatcatcctacgatattctaccatattaggtatgacaggattgaaactaatcatcggacagctgccgggactgggtgccggtgtttcaagaacagccaacaattgccggatagacatcggaaaccgtgttgtaatcaatggggttacattgtatttgcaggaagatgactcatatgttagtattggagatgacagtcagttaagctggggaattgatatatggtgtactgatgcacatacaataacagatttaaagggtgaaccgatcaattttgccaagtgcatagaaatcggcaagcatgtatggatagggaaagatagcaagattggcaagaatgtgaagatagcggacaacagtatcgttggttggggaagcatcgtaacaaaagaatttaatgagccgaatgtaatcattgcaggtataccggccaaaattgtcaagcgagggataaattgggaccggagatgtatcaataagtatctaaaagaaagattataaaaaggaagctccaataggatctatgaaacatagattttattggagcttccattctatgtcgctatgatactttttatttcataagttcctccatatccccattcatgatatgaggcaaataatgagctatctcatcagtactccagtcccaccatttcaattcctgcaattgcgcaatcgtatcttcgtcaaaacgcatccggattttcttcgcaggggtcccgcctactatcgtataaggaggtacatctttggtgactactgccctcgacgcaataatcgctccgtcaccgatatgtacgcccgccatgacaacagcctcataaccaatccatacatcgtttccaatcactatatcccctttattatcccatgccgaagtgatatttcccttatccaactgccactcctcaaaaaatataggaaacggataattcga

SEQ ID NO: 4709 - DNA, 601 bp, Unknown
  gut microbiota DNA sequence
ttttttcgtattttcctcccttgctacgatttccccttcttcctgccttcttccttttcagtctttcaatccccttttcctccgtcctttttttcttttctttggattcccgttctggtttcctttgtgcatcttcttcacctttcctgtatttcctcttcctttcccttgtgcatacgcccgtgtcctcgcccttctaacgcgcgtgtgaatataataaggtgtacccctttccgcctttcctcctgtatccgagaaaaatatgttctacaacatccttataactcaacactttagcttctatcctcaaaaataattcaaaaaaagagtgatttaagtttggagtatatttgaaaagggcgtacttttgcacccgctttccaagagaagaaagccttgttaaattgacttagtgtaaaagcgcagtactgcttgaccataagaacaaaaaaacttccgataaagtttggaagataaagctaaaagttcttatctttgcagtccgattcgcaaagaaaaggcgttttgtttttcttctttaccttctttccctttcgctaagagagtctgagaaacgatagaaaaagaaaagcgaaaaaaa

SEQ ID NO: 4710 - DNA, 590 bp, Unknown
  gut microbiota DNA sequence
aagatgtatcttaataatcctgtcccaattcattagaagctcaaacagtcataagtctgtaagatttcttcctgtcttaaccccaagtatcttttagtaatggcaacagaactatggttgaacagttccatcaactttactaatgcaagttcagcgttatcgctgttcatattatagacctgcctaccaaaagtttttctaagcgaatggcagctaaagttcttaatctttaacctgtacttcttcttcacctctttaagaatgatattgattctttgaactgtgaagatagtgcctttctgacttataagaattggcgcattgattccaataggatttatatgctcgtagcactctttaatatgctgctgtaactgtgggttcagtctgatagtccttaccttgcctgtcttcttctcaattactgtaaattcgtcagcatctaatatctgcttccatcttagagatagaatatcagatattcttaatcctgtgaagcatcccaaagctataagaagtgagattttataattctcgtctttggctaacttccttatgaggttcattgcatcagaccatataagatagtc

SEQ ID NO: 4711 - DNA, 594 bp, Unknown
  gut microbiota DNA sequence
tatatatatagtaatatgcatgagacgtaaggtattaatgaagtcaataaattgtacggcatcctgaacagagcaaaaatcagctttatgctgactaacaatacttttacaatgaagagtttgatcctggctcaggatgaacgctagctacaggcttaacacatgcaagtcgaggggcagcatttcagtttgcttgcaaactggagatggcgaccggcgcacgggtgagtaacacgtatccaacctgccgataactcggggatagcctttcgaaagaaagattaatacccgatggtataattagaccgcatggtcttgttattaaagaatttcggttatcgatggggatgcgttccattaggcagttggtgaggtaacggctcaccaaaccttcgatggataggggttctgagaggaaggtcccccacattggaactgagacacggtccaaactcctacgggaggcagcagtgaggaatattggtcaatgggcgcaggcctgaaccagccaagtagcgtgaaggatgactgccctatgggttgtaaacttcttttatatgggaataaagttttccacgtgtggaattttgtatg

SEQ ID NO: 4712 - DNA, 72737 bp, Unknown
  gut microbiota DNA sequence
gacggattctgggaccggaaactggaggatatgccgggcagttatgccgatgctttcattatgagagacaaacgcatgagtagtgctattgccacagagacattctctaaggaggaattgtcggaagattccccctctctcagttcaaaattgtcatatccctactttacttgtgagttgggcggtggtatgatgccggcgtatcatcgtcggataaatatcaatggaagggagcttaaaccgctggttatatgcaagctgggtagtggctccaatcttccgggatactatatgtatcatggtggcaccaatccatacaatcctcttcacactatgggagaaacgcaagcctctccgggtactaatcataatgacctgcctcatatgacctatgattttcaggctcctcttggcgaagtgggacaagtattcgagactccctttcatgaaggacgttttatccatcagatgttgacagactggggcagtgaactcttgcagatgaatgttgactcattaagcaggcattatgcccgccggggtgctttcgaattctataatgactatgtgcgtatcaagaatgagagcgggacgtcccatgtcacttttaaagactatcggactgagggtgcaaccattgactggactactgtagaaccgttctgcaaagtggatggccttatctatttcatcgaaatcaggggtaaaaagcctcaaatctccgttgacggcaaggtctatacttgtaaacttaacaagcagcagaaggcgggcaagctcaatgtctgtgtgctctcatacgaaaaggcaaagactgcctataaaattgacggtaaactgctttatgccaagaatggcggtattctgtataagagtgattcatgcatcgtggaggaggtatggacaaagtctcctgtcattgccgccacagtcacggaagtgaaaaaagcggatgctccccgtgttgtccccatgggtcgtcaggcagtggctgcgcaacctgtagaagaggactttgcaaaagctgcggtatacactattaactatgatacatctggaataaataattatgataatctttttctccgtataaattatcggggtgatgtggcccgtgtgtatgctgacggcaggcttgtagcagataacttctggaatggaaaggagatgtgggtccgtatggcagatctcgtcggcaaaaaggtggaactaaagattttacctttacgtaaagatgcccctgtctactttcagaaagaacaaaaagctatgattgaggcggccaaaggtgactatatgcttgggctcgattcggtagaagttattgagcgtcatacactggagtttaatgatgctttttaatgtcacttgtcactttgtagaactaaccggttcattatcaatgaaaaacgggtgacaatagatggtgataatagggtgataatagaatagtaacctcttttctgttatcacccttattgtatcttttactgatttaatctactgattattaggctttaaatacaccacccggttcccatatccgcgagtgttaagaactccgttttctaccagaagattcaattcccgtagtgcttttcccttcaataaacccgtaatctgagagtattctcttcgagtgatgaagtgattctttgctaaaaaggcttccagtcgggaacggcgtgtctcttccggcaagttcgatgattcttgaaatccgaatttggcacgggtcaccgtccccgaactgcgtcggcgaaaccagggagtggctctgaaatttacgttgtcgaaagagatggagaccgaacggatctctttcttgtccatcaccggacgtgccctcaaactagaggagaaatatccgatttctcccagtttcacatgatacccctcacttaaataataggataccttctcttgaaaagctaccatgatacctgccaaatctccctcggtgaaagaagaggcttcggctatttcacgaaataaccgtttgctgtcaatggttcctttggatacaattcggggatacagaggctgtacttctccgtctcccttttcattcggttttcgccgaaagtcataatctgctgccatagcgtcacttgttttttgttggttaataggattgttactcaattgataccgcgtgtgttagtacaaacactagtaaccttaacatgtagacaaggctcgactaatatattttgtctgtttcacgttttcgttccacgtacgtgaacccaatagttcacatacgtggaccgatgggaccatgtacgtaaaacgatttcttatcactacaaagatacattaatctaagcttctaaacaacttaatgaacgttttatttactattaattcaaggagcttccgaaagaatggaaaggcggataaataatctgtaataataatgaatagaaaggttgtttactgtctgttttatgcctacctttgagggatatacataaatatttaagaaaagtaatgaagataacacaaatcagggagaaagatggagtcgaagtattaagtgtattagattttaacttgttgatagagaagataaaaacagagattaagacccgtccggtgaccggattgcgccaagccctgcattttgttttacccggagaatcttgcagttttgccggaaaacttcccaaagtaatacccgctgccgttttcggacgtgtaaatggcgtgaagcgaatgaaagtatataatggcatcgtggaactgaccgtaggtccgttggcgggaaaagtagaagtggatctggtcaagaaaaaagcggctgaattgccgcagaccatgtttgcatacatgggggcgagtggaaattccgtgaagatatggactctttttacccgtccggacggtacgttgccgcagacgcaggaagaagctgaaatttttcaggcacatgcgtatcgtttggcggtgaaatgctatcagccgcaaatcccctttgatattcagttgaaagagccggttttggagcaatattcacggctgagtcacgatcccgaacctttctatcgggaaaattccgtgccgttttatctttctcagcctttcgggatgccgaaagaaatgaattatcaggagaagctgaccccggaaaagtctccgttgaatcgtgccgttccgggatatgatacggaagatgcgctggcattgatgtatgaggctgccttgcgaaagacttttcagtcgatggaagaggggtggaggcggaatgatgatttgcagcccctggtagtccggttggcggaaaattgtttcctttccggtattccggaagaggaagtggtgaggaggaccattcatcggtattatcattcgaagcaggctgtgctggttcgcgagatgataggcaatgtgtatcaggaatgcaaaggcttcggcaagaaaaacgggctgacaaaagagcaatatctcaatatgcagacagaggagtttatgaaccgtcgttatgaattccgctacaatacacagataggtgaagtggaataccgggaacgatgctcgttttattttcgtttccgtccgttggataaacgggcgcagaatagtattctgctggatgcgcaaagtgagggtattgcggtgtgggaccgggatgtggaccgttatctgcattcaaaccgagtatctgtttataatccattggaagaatttatttttcatcttcctaattgggataaaaaagaccgcattacggaactggcagaccgtgtgccatgtgctaatccgcattggacgatgcttttccatcgctggttcctcaacatggtagctcattggcgtgggtatgaccggcagcatgcgaacagtacttcccctttgctggtaggtgcgcaggggacacgcaagtctaccttttgccgggatctgataccgccgggacttcgcggatattatacggatagtattgatttcagccggaagcgggatgcggaaatgtatctgaatcgctttgcgctgatcaatattgacgagttcgatcagattactttgacgcagcagggctttttgaagcatattctgcaaaagccggtagtcaatcttcgtaaatcgtacagtaattcggtgcaggagttgcggcgttatgcttcgtttatcgcgaccagcaatcagaaggatttgctgactgatccgtccggtagccgtcgttttatgtgcgttgaggtgacgggtacgattgatacggcacgcccgattgactatgagcagttgtatgcacaggctatgtacgagatttgtcatggcgagcggtattggtttgacgataaggatgaggctatcctggcacaggggaatcgggagtttgaacagactccgccggctattcagttattctatcgttatttcaaggttgcaggggatgataaggaaggagaatacttatctccggtagaaatattggattatctgcaaaaaagaacgaccattacgctgtcttccggcaaggcgcatcactttggacggctgcttcagaaagaggggattccttgcaaacatacgaataaagggactgtgtatctggtggttaagatataaaagaggaaaaagtaaaagtgacaatagaaagctttattatttctattgtcactctattgtcactctattgtcactgtctattgttactcttattactttgataatcaattgtttaagttgtaaaagtgacaagtgacaataagaatggcaaaataatctttatagttcttgattgtacttcgcaaacatgaatttgtgtttatcgcatatatttttaatttgtcaacttctttgtcgacacaattatatttgaaaagtttgccatattgcttttatatatggttattcttgtttcaagaaaaaccggaataaattgtattatctacactctttcttatttaaaaaacgcgttcagagcatgtattttcgttcaaaaggcggtattttccatgtttatgtacgattcttcattgctatttcttatataagtcgttaagtttgcaacagtttttcacaggtattatgataaagtgcccgaagaaaaacagaatctaacttttgtttaattaaaaaatagataaaatagatttatattgttacttaacagattttaatattatgagaaatgtgatgaatcgtaagcggcattggctgctattattgctcctctcacctttttttctctcttgtgaggacaagatggatgagcattatgaaaaacccgaatggctgaaaggtacagcttgggaagttctttctaatgaatatggaggtaagttctccatgtttctagaagcggcagagttatcaggctttaagcctattcttgatggtaagagtgtcgcaactgtcatggctccggacaatgatgcgtttgctgcttatctggaagaacacggttatgtttcagtgaaggatataccgacagatgatttgaagaaactgattggttatcatttaatctactactcttatagcaagagtgatcttgaaaacttccgcccggaagacagtgcaacaagcaaagacgatgatgacgatgatgaattgggagttttacaaccgggaatgtattacaagtttcgtacacacagcaccagtcctattacaaaggaagtggatccatcaacaaacaatactgtaaccgtctatcatttagagcggttcttgcctgtattctctcaccacatctttgcctctaaaggtatagatgccaagaagaattatgaatttttctatcctaactctacgtggacgggagataacgggttcaatgtgtcgaatgcaagtgttaaagaataccaaatcataaccaataacggctatatatataatgtagacagggtgttggaaccattggaaactatttatgatgttttaaagaaaaaatcagattattccgatttcctcgacttttatagccagtacagtacttatgcctatgataaggacttgtctgccgattatggaaaagcagtaggagtagatagtctttttctgcatgcacattcaccaaacgggcttccgaatatcgcgttggaatggccgacacctaacttccgtctttatccggaattagcttctatctcctatagtatctttgcaccgtccaaccaggcactcaacactttcttcaatagatattggaaagctggaggatattcttctttaactgatttggacccgttgattactaagatattgctttatcaatcagtatatggaggttctatcgttttccctgacgaaattagcggaattaccaactctttgggttcgcattatgatttccagttgagcgatgtgaaagataagagtatctgtgtgaacggtagtttttatggattaagcaatttcccgatgcctgaaatattcagtaccgtgatgggaccgtctttccttaaaagagattacctgctttcgttgtatgctatctttcagagtaatcagatggctgcgtacactaccactgctacaaactatacgatgttgatcactaaaaatagcggatatgaaatcagtgacatgcgtctgatgtctgatggagtcggtaatacactggcaacatccggagaagatggtgatgtggctgtttcaacttcggacctgaaaagaatcgtcagtggtggaactgtagtaggagatgttaactttaatacgccttgggctgtttatgctactcaggatggtggaacatattggtttgtgaaagatgggaaaatgacaacgaactatgtgtttaacagtgtattaggtcaagatccgcaaactgttattcctacacttttcaccgaagtaaaagaggtgaccaatgatgccggaggatcttgggcaaacggtaaagtatatgaatatgaaagtgacttcggtgtattcgggaaattggatggattggaatatacaagcctgaggacaatgttgacctctattggagaaacgaaatatccgaattttgtattcgcctatttaatgagacaagccgaactgtttgctactatagacggtgtacttgcttgggattacagattggcaggacgtcttatcgggttcattccgacaaatgaagcactaaaagaggctttggataatgatcgtattccgggagtgaaaggtacgatagatttaagtctgccatcaccaactcttcaaggagagattacaaatcaatacttattacgagaatatctgctcaattatttctttacgcctaccaatgctccggttgcatcaggctgtccgtatctcggatcacctgactggctatcgggagaatatcgtaacagcaataatattcctgtgaagtatactgataacggcgctttcatcaccttgcagttgcagaaccagaccaccggtcagtacggaaatgcatgtaagatagtatcatacgagaatttcccatttgcttttatggacggtgctttccacctgatagacgctgtttttaattaactgaatatctaattaatcatgaatcagacaaataaagtcttttatacattggtagccatttttctgtcctgttctatagaaatggcagggcaggtacagaaggttatatccggtacggttaccgaattgtttggaaaaactgctgaaccactggttggtgtaaatgtcaatctagtaaacaaccagaaccgttcgttgggtggtggtatcacaaacctgaacgggcaatataatgtgaaagtcccagagggagagaaagatctgacaattgtttattcctatatcggaatgaaaacaaagcgtataaagtatacagggcaaactctgctcaatgtgactttggagtcagaatcaatggcggtggatgaagtagtagtttcggcccgtcggttaaatagaaatgatttgggtatttcggataaagaaatggtttcggctactcagaaagttgatatggaaaagttgattgccgctgcacctgttgtatctatagaggaagcgctgcaaggacaattgggtggtgtggatattgtattgggtggagaccccggtagccgtagtgctatcagaatccgtggtacaagtacgttaaatgcatcttccgatccgttgattgttattgatggtgtgccttatccgactgaaatcagtgatgatttcaatttcagcacagctacggaagaagatttgggtgctcttttaaatatctcacctaatgatattgcttcagttgaagtattaaaagatgcatcagctactgctatttggggtactcagggtgccaatggcgtattggttattaagacaaaacaaggtacggttggtaaaactcgtttctcattctcctccaaatggacaatgaaggaagatccgagtactatcccgatgttgaatggtaaggaatatacttctcttatgcaggaatctatctggaattctgccaaatacatcggtctgaataatccgggaaataaatacctcaatatgttgtctgatgctcctgcaatcggtgacaatccggactggagatattatgatgagtataatcaaaatactaattggttggattatgtacgccaaaaagcattggtttctgataacagtttttcaatgaatggtggtggtgaaaaagcaacttatcgtttctcgttaggatatatgagtgatatcggtactactatcggtacgtctatgaaccgtttaaatacttctatggtcattaactatcagttctctaataagttgaaattcggcgcagacttttcttattcgcagaccaatacggatgcgaactggacaaacactattcgctcggaagcattgagtaaaatgccgaacaaatcgccatttactgtaaatgacttgacaggtgcattgactgatgaatactttacttaccacgatcctaattttgaaggttcgtttaatggaaaaagtaattataatcctgttgctatggcacatgaagctatcaacagaactgtgcagcgtgaaggtaagataacattccgtgccgattatgagattttaccgggattttattataaaggttgggcttctatcaatatgcgtgcaattaaaacacgtcgctttctgccacaagttgtaacaggagtggaacaagtcaacaaatatgccaatcagagtgcggacgcttattccgatcaattggctttgcagacagagaataagttgatgtatatcaagaactggaatgacaaacataatattattgcgaatgtattggttcgtaccggtcagtatatcaattcaggctataatagcgaagtatacggtaatgcttcttccgatctctccgatccggtagtcggaactactattagtgacatgaattcaagcgaatcggaaacacgtaatgtatcttttgtaggggtattgaactatacattgctgaatcgttatgtggtacacggatctcttaatgctgaaggtaactctgctatgggacgtaatgaaagaatgggttatttccctgctgtaggtcttgcatggaacttccagaacgagcctttactggaaaaagcaagagataaatggctggacgaagcgaaattccgtttcagtatcgggcagagtggacgtgctcccagcggtgcttctgtttatctgggcgcctacgtgaaaggaacagactatatgaacatgtcggctacaaagcaggctcgtatgcagttggataatttgaaatgggaaacctctaccgaatataattatggtctggatgcttccgtattaaaaggtcgtttaagatttacattcgattattattataagacggtgaaagatttgctgcaaaagaactacaaactaccttcaaccactagtttcggatcgattagttattttaattcaggtaaaatggagaacaaaggttgggagttccgtacagatgtcgtaatctttgagaataaagactggcgtatcaacggttatgtgaactttagccgcaacgaaaataagattactgagctacctgccaatatggtacaggagaattattcaccaaagaatggggcatatgctgcccgtgcggaagttggacgccctatcggttcgttctatggataccgttacaagggagtatatcaaaacaccgatgcaacatatgcacgtgatgctgaaggaaatgtaatgaatgatgcaaaaggtagaccaatcgtaatgaaaaacctgacagctacctgtcagccgggagatgcgatgtacgaagatatcaatcatgacggtgttatcaatcaatatgatattgtctatttgggtaatgccaatccgacattgactggtggtgcgggattgactgtcaagtataaacaattttctatcaatactttcttccacggacgtttcggacagtcagtcgtgaatacggctcgtatgaataatgagtccatgcacggtaacgccaatcagagtacggctgtgttgagaagatggaagaacgaaggtgatattacagatataccgcgtgcattgtatggcgaaggattcaactatttaggttctgatcgttttgtggaagatacttccttccttcgtttgaaacagttgacactgaattatgcatttccgaaaagcatttgcaataaattgggtatcacttcactgacatgtttcgttacaggatacaacctgtttacttggtcttcttacaccggtcaggatccggaagtaaacctaccgtcgagaccgacagacctggctacggacggtgcaacgacacctgtgtccagacgatatacttttggttttaacttaagtttctaatacgataacaaaatgaagaaattattaatatacatagcaatggccggagcaactttgctgacttccagttgtaatgattggctagacgtactgcctaagaacgaacaggtatctccggaatactggaaaacaaaagagcaggtggaagaggtactagcacaaggatatcaaaacatgcgtctgacggttcctacattaatttattggggcgaacttcgcggggcatccatttatgcttattcaggtaaatcgaaacaggaattacagaattttcagttgaattcttcatccggcgaatgcaaatggggaggtttctattctatattgaatgtggcgaactccataattaaatatgcaccggaagtaaagaggcaggatgaaacatatcatgaggcagtaatgaattcaaatatggcggaagcatattttatgcgcgcttggacatactttacgctggtacgtaactttaaagaagtgccgttgattctggaaccctatatgacagacgagtatgctgtcgatatacccaaatcttcggaagagacgattatcgcacaaatcaagctggatatcgagaatgcactttccacaggagcagctaaagaaatgtatgatgatgaagactggaccggcatgagtaaaggacgcgtcactgtatgggcactgtatgcattgatggcagacgtgtgtttgtggagcgaagattacgatggttgtgtaagatatgcagatatgctgattaattcaacttccgctttccgtccggcatttgtggaagaccccgaacaatggtacaatatcttcttcccgggcaacagcaacggttctatatttgaactaaactttgatcagtcacgcaatcaatctcctgacgatgatgctacagcgagtacatatccttcgccatctaacgtttatccttggacacaatcgacagttgccagtcttcaattctcgaacgcaatgtgtaagcgtttgtttgacgaacaaactgatcaatgggtgacttccaacactgttcgtggctatggcaatacgtttgttctttcttcgggaaccgttattggtaactccaatacagaaggctatcttccctttaagttcagaatcggcggaaaggatggattgtctacgactcgttcttataaagatgccaactggattctctatcgcatggcagatgtattgctgatgaaagctgaggcattgatctggaaaggcggcgaagcaaatttcgcacaagctttggaacttatcaataaaatacgtacccgtgccaacgtcactacattaagtgttcagacgaatgctgtatcacaagaaaatatgctcggatacttgttgcaggaacgtgatcttgaatttgctgcggaaggaaaacgctggtatgatcttttacgcttcggcaggtcacagaactttaaatataaagatcagtttatcaatatgatcattgagaacaattctacggttagcgccagttggatacgttcggtactgaagaataccgatgcttggtatttgcctattagtcagggtgagatcgacagtaacccgaatttaatacagaatccttattatgatgtaactgcaaattaatatatactatgaagaatattgtaagattttgcttaatgattttgtgcatcacttgttattcctgtgatgatccgtacaaggatacggtatttaaagtatatgatgtacaacctgcggcaacctatctccagaaccgtcctgacgatttctccgaatgggtgaaagtgttgaaatatggagatttgttcaacgctgtaaatcgtgcagaggatgctttcactgtgttggcacctactaacgatgcagttctccgcttttatgaaaagaagggagtcacttctatcgaagatttgggatatgaatatgcccgcactcttgttacatatcatgtcatcaatgactccattgatcgggaggattttgtgaaaagcggtgaactgcctggcagaacactttcgggagatgcattgaaagtatctttcggtaacgaaggtggcgataaatctgtttacattaacaaagaagctcatgttagcgaattagctatacgcacagccaatgggcgtatatatgtgcttgatgatgtgttgagtccggcagtagagactatctacgcacgtctttcagacaagggtaattataagatattctgtgaagcgttggagaaaacagcatggagcgattcgctgagtgttgtgaattccgtactcgaaggtccgttaggcatgagagtagaattgcgtaaatatttcacagtatttgccgtatccgatgctgtatttgcacaggaaggtatcaccagctttagtgctttggctgccaaggttggagcattgaccgacgattatgaacttcccaataatgagttgaacaggtttatagcttaccatataatggatggagaacatactcttgaatctcttcgcacattctccaaaccttttgacagagaaacatgggaatatagaaagatgttgaataccagagctacaaacgacttgatcttgatttctgaaaacggattaaataatggagttaaattcatagaggaacaagctgacgagattgtgaaaaacggatatatccaaccaattgacggatatctgccagtgaaaaccgattttgaaccaatacctgttatttttgatttctgtgattatcccgaagtatcttcatacattgctgctaaaggaaaaggacaactttatcagcaggtttcacgtgacgatgatgatacgtacactgcattaacgaaattcatcggcagacaagagatcgttccacaagtttcatcctacaaaatagaaatgggacctagcggtacgttggcaagcgactggagttatttgtcatattgcaccaaaggtgctaacacttcgggcaactggactaagttgatgaacaatgatgccttggtggtcaatataggatacaacggtacattagatttgactattcctcccattttagccggaaagtatagaattactttgtattacgcatacgatccgtctatgaagtttatcggtgaaagaggagaagggagtcaagctggtttgaccaattttagattagattctaaacgactggcaggtggtgataacaaacgtatttacgatggaaagacgggagatgtacaagattgtttcaatacaccgttaacatccaatttgagcggagaggaaactgcgtttgaatttacaacgactgcttctcacacattgaatgtagttgtggtagatcctgcagccagctcgcataataaattccgtatgtattttgattatatattgtttgaacctgtaatagaataacaaccatgaagaaaattagatatatcatagcatcagctttggtttcgattggactctgcgcctgtacggatacttgggattcgcattattccaagtgggaaacggtgattgacaacacggagattcaagcggtggatgagccggcagccgactttttaaagactgctcaggattatagtaaaatgtatgaactgtttgataaaacaggcgtgattaaaacttggcaggagaaaaacctgatgtatactattatggtggtgggtaatgaatctaccgctaatgccaaccaacctgttacaaaagcagaaggtagcgaaggacaagcaaccgctgaagagatatttaaggcggaagcacacattactgatgctcttctttcacccagtaatctggaagatggacagcgtctgttgatgtggaacggtaagtatgtgactgtaagaatctacgatgagcctgtggatggcatggaaccgggaatttatttcaatggttcgaaggtgaaaaaggtgattaaaactaacaatgcctacatttatgatttggaagattatatcaatactcctaaggcattaatggaatatctgaaagatttgccggatgaagaatactctatttttaaggaaatggtattgagccgtacacaaagagtatttgataaagctgcaagtacacctataggaattgataaaacaggaaatacggtatatgactctgtattcacagaaaagagtcagtattttgcagataagaagttagatctttattcagagaacattaccgctacattgctggtaccatctaatgacttgatagaaaatgcgttgaaagaagcaaaagagaagttgaaatcgtggaatatggaacgtgaagactctattttgaacaactggatattccagacagctttctttagtaaaaagtatgtaaaacaagactttatttataatgagagtgatccggcttcaacgcaggacttctattctgtttttgatcaacaatggcgtacaacagttaataaagtagatcttgataatccggtagagttgagtaacggcgttgcttacaagataacttcattgaaaataccgaccaacaagatattgatttggagaatcaaggaacgttttgagacgtttgaccaattgacggatgaagataaaaagtactattatcccggatataattacatcagtacttatctgaaagatatcggcgagaatgtgcaaatgaatcgtgtaaaacaatatgtaggtgccaatcagcccaaaccgtggctaccggctgtttattgtaaatctatgatgttgtgggttgtggataccgacagaccaggtatttttaagttcaaatgctatcgactggttgaagacaaggcttctactacaggctttacggctgtgccttataaaatacctgccggaccatacaatttctatatgggattcaacggctctcgttcgcaagtaaatgcaaccttttatttgaatggcaagaagattcctaaatgtgaaagcggccctattccatcctctaccatgaaaggttccaatcatgaccgtagtggcggtggatatagcgaactttacaaagatagcaggtacgaccgtgacggatctacggatcttggggttgtcatatttgacaaaacggaagaacttgaagtaacgattgaatttacgaaaggtgcaaaaagtgacatggaacccaccacttggtgtttccgtccaacagtagatttgtattaaccttgataaacaggatatgaaaaagataaaaagaatacttagtatttctgcgctactcgtatgtggggtggcaaatacatggggacaaggaggccagaaactaacaggtaagattttgtcagcgacaaatcagccggttgaaggcgccattgtcacagtactggatacgatgaatgtaactacaaacaaagaaggtgcattccagtttgaagtgaaggatctttctaaagctggcgagatttctgtatgggctccggggtatttctccgtgaaacagctaatcagagaacgttcgaatattgtgattactttgattccggaaaatcaatataaatataatgagactatgattctccccttccgtcgggaaggggaaatgcagttggaagactatacggctgctactaatatcgctaagaaagattttatgccgggaactacgaagattgatcgcgcattgacaggacaagttgccggtttacaagtgaaacgcagtagtggtatgccgggagaaggcagttattataacttgcgagggatccgcacattgactggtgataacgctcctttgattgtgataaacggtgtgccccacatgcccgataaaacaccttcggcactgattgatggctttacacgcgatatcttccagttttatcatttgcaggatatacagaatatcactatattgaaaggtgctgaggcggccatgtatggttcaatgggctccaatggtgtaatcttgatcgaaacagacggtacggcatccaatgacttggagacgcgagtaagctattatggatcatacggaatcaactggaatgataagcggatgccggtgatgggactggatgactacaaacagtatctggcagatatgggaatgactatttctaaggacccgcagaacttttataacaattttcctttcatgcagaatccgaacgatccacgttacaactatctgtataacaataatacagattggcaggatttgatttacaagaacaccgcttccaccgatcatcttttcagagtagaaggtggtgataatattgctaagtacgacctatcattagggtattaccgcgagaatggcctgatggataacacaagtatggaacgttttcatacattattgaatgctaatgtattggtcaataaacaactgaatatttttgcaacggtaggtttggcttatatgaacggacattatcagatgcagggcatggatattacgacgaatcctatattggcagcttacgcaagatctcctttcctgagtccatatgaaaaagaccgcgagggaaatacgttaaagacttacgcatcgcatttctatggacggagcaagagccgagattacagtgtcagcaatcctttagctatcgttaacacgttggattctcgcaatcgccaatatgatctgaatatgaaagccggtatcgcatacaaccctttccgtgaactgacactgaccggaacagtaggtctgtattataattacgataacgaacatctctttatccccggagcaagcgaagccactatagtgccgctaagcgataaatatggtttgcgaaataatgcggtaagcgacggagtagctgtaacaacaaactttttcgccaacttgaatgcaagttataagaaaacattcaattatgttcatcagttgaatgcaatagccggatggcagttgatgactactaaaaacgaatatgatgcaggagaagggcgcaacactggcaatgacttttaccagacattaggcagcacgattgacggaagacgcttcttgggttatatcaatagctggaactggacaaacttttacggacacgccgactatacttacaataatatggtacaggcatctgtgaatatagctgttgatgcagcttcttctaccggtacggatgtagctcgtttctatacatatccgtcagtaggagtaaccttgctgggaaaaggatggaaaccgcttcttgatgctacatggctcaataagttgaatgtacgtgccgaatacggactgacaggtaactcacgcttctcttcacagatgggtggatactattattctacagtgccttacatgcagttgtcaaccatcgttcgttctaatattccgaacgtatcattgaaaccggagaagaatgcttctttgaatctcggattggatttgtctgtattaaacaatcgcctgaacgtatcttttgattattacaacaatcaaatcagcgatatgatctcagccatgcctctttcatccgtttatggatcggttccttattatgcgaatgtaggtaagttggagaatacaggtatagagttgtcagtgcaggcttcattggtgcgcactcgtaatttcgagtggatcgtaggtggaaacatcactcgctccagagataagatcaagtcattgggtggtgaagaacaaattgtgttgagttacgataatggtgtgcagatggtcaaccgtgtgggagaatctccttaccaattctacggttatcaggctgacggagtatattccacacaagctgaagctgacgctgcaaatctcagtaaccgtaccggacgtcgttataatgccggagatgtacgttttgtagatcagaatggcgataaccgtattgacgataaagaccgtattcttcttggcagtgctgctccctcgtactttggaggtttctatacacaattgaaatataaaggatttgctctttctgcagagttctcatattcaaaagacaacatcgcatacaatgctgtcagacaacaattggaggctgtgtctactaccaacaaccaaagtattgcagccgtaaaccgttggacagtagaaggacagaagaccgatatgccgaaggcaacatggaaagatcctgtgggcaacagctatttctcttctcgctggatggaagatgcatcttacctgagaatgaagaatgtgacattaagctatactttctctaaaacactttggaatttcttccgttcgggaacaatatatgtgacaggcgagaacctgttgaccttcaccgattatttgggaatggaccctgaattctcttattcttatgctgagaatatgcaaggttttgataatgcaaagctaatgcaacccaaaacagtgaaaatgggcgttaatttaaaattctaatgaaaatgaaaaagtttaagatagaaataatacttatgggggtgttggcgatgatattcgcttcgtgtagtgacttctttgagccaaacaatgatacgaccttgaatggtgacagatatatcaaggaaggcagcgagctttattccggttttctgggtatcatcacaaagatacaagctatcggagacaaagctatttatctgaccgatatgcgtggagagctgttggaacctaccgaaaatacaccggcagacctttacagcatctataattatgatgatgatttgagcggtaacacatacgctgaccctgctaagtattatgatgtaattattgcttgcaatgattatttgcagaaagcaaaagaatacagggatacacatgttactaccgtagatgacgatgattatagaggtctgattagtagtacggtgagattgaaaacatggacttatctcatgttggcaaagatatatggacaagctatatggttcgacgatccgatgcaaagcatgaaagatatcgtcagccagactcctaagaacctgagtgagcttgtcgatgaatgcgacaaactgttgaatacaggctttgatggaataaacggtacatacaatatgtcatggaatgagtggcttgatccagctaacggagctacttccacaaacgatgaatataaaagatggaatatgatggttcccggatacttcgtattacaggcagaaatcgcactttggaaaggggattatcagaaagcggctacaacgattcttggagaaatgagcagaacttttgcgttggctgagtatcaaggaaatgttgctaatatcaagtatatgcgttcgggaagttacggtagcaattacggtcagcaatatgattctgagatgccggtgttgacagcagctgaatctgttattatgtatgattacaaatacaatcagcagaattcgttattgaatcatttcgaccgtagcggaagctatatgatgcgtgcttctgtgccaggatcaaaacgttttgaagatattactttcaatccgtctgccgatgcaacggctattaaaacatctgatgcgcgtttcagagccattcaggaaatcgaaaaagatgtggaatatgcgatacgcaaataccgtggatttagaaagagcggacattctgttgctcatgacgatacatatataatgatttatcacacttctgatctttatttcatggcgattgaagcgctgaataatatgggacgttttgagccggtatccgtcttgatgaatactggtgtggatcccttctacggagccggtgtagtattgggcgaacaatggcaaggactgaattgcaactggggattgtggacaacactttatgcgggattccgccgcacgtatgccgataacggtgttcgcggtattttaggacttggcaagcgcgatatgtggcagaccccggaagacatcaaagaggagattgtagcagaacaaaaattagacggtttgagtgacgaggacaagatcaaaaagcataatgatattgaattggtgaaagaagccttcttggaattcccttgtgaaggaaaaacttatccgcttatgattcgtgtggcaaaacgttggaatgactattcattcatagcagattttgtcgggcagaaatatgaatccgatcaggctaaacaagcagaagtaaaagccaagattatgaatggtgcttatttcgtaccttgggacttgcaaggtaagtcttcttctcattaaatagcatgtttttcaatcaaaaaaagataattatgaaagatataacaaaaataacgtacttacttttgggactgatgttatcagtccctctagccgcacaaaagacatattatatggatcctgagggaagtgattctaatccgggaacttcagataaaccttttgccactttagtaaaagtgcaggaagtggtagttgcgggagatgtagtttatatcaatccgggaacatatgtggttcccgccaatcaagtgccgatgacaactaccaatagcggactttatcattgtgtatttcatatgaataaaagtggtgaagcaggtaaacctatttcttatttggctaatccgaataaacaggggaggcccatttttgatctttcgcaggtaaaaccgaaagatcagcgtattacggtgttttatgttacaggttccaatctttatctaaagggatttgatgtcatcggtacgcaagtgactattaccggtcatacgcaatcagagtgtttccgtattgtaaaaggagccaataataacaaatttgaagatttgagaacgcatgatggtatggcaattggtttctatttgcttggaggaagcaataatcacatcttgaactgtgatgcttacaacaattatgattcggtttccgaaggtggtaaggggggcaatgttgatggttttggcggtcacattaactcatcttcagttggcgaaggcaaaggcacgggaaatgtgtttgaaggatgtcgcgcatggtacaatagtgatgatggtttcgatttgatcaattgcttcgaggctgtgaagataattaattgttggtctttcttgaatgggtataaacccggaaccaaagaagttgctggtgacggtaccggttttaaagccggaggctatggaatggctgccgacaaactgcctgccatacccagtgtgatccctcaacatgaggtacggaatagtttggcttattacaatagattgagaggattttatgccaatcatcatttaggtggaattatatttgagagcaatacggctgtcaatagcggagaaaactataatatgacaaaccgtgagtcacctctggcgcttcctccgactgatgtcaacggatatgatcatatggttaagaacaacttatcattggttacaagatcgggtagtaagcatattgtaatggtgaacagggcgaagagcgaagtatccaacaattcgtttgatggtagcgaggaagtgatagaaaccgattttattagtttggaagaagcggaattgatgagagaccgcaagcctaacggagatttgcctgatgttaatttcggaaagctgactactgatgcggaattacgtttttggggaatgggatgttttgctacaggtgaacctactgatcttgattttggttggttgaagaagccgacaattgttgtagttggaagtaaagccagtgtagtgggacccgaagctgcatcgttcacgaagatgtatgtgattgtagatggcgaagaaacgacggagtttgataagaactcaatagacttgtctgattttagcggcgtgcttgaagtgaaggcagtcattgaagatgcaaacggaaacattacaaaatctattgcgcttaaatttaaaagataaaacggataaacttagaataatatgaaacagtttattaatatttatataatatcttttgtcttgatattatctcaactcagcctcttttcgtcttgcaaagacgaagatacggttgctgaactgaagcttgatcgtacagctattcaaatcaaagaaggaagtgaaggtatactaaagattgaaagcggaagcggtggataccagttttctttttctgaagaaggttatgctaccgccaagtatcgtgaaaatctgatatacattcagggagtgaaatacggcaaagtcgtcttgaatgtaacagatttggaaggacacagcgtatcacttgatgtagtggttgtatcaagtgtattgagcaccgataatcagcgttttgtatggggaaacatgattgaattaaataaagccaataattggagtttgttcaccgacgtcaatagtgttgctattaccaacgtaatggaaggaagacaatatgtgttatcctgcgacggtgatttgtcggttggtgtgaagtcgaatgccacgttagagatcttgagtagtaaaaccggagctgaaccggagatcgttcaactggctggaatggaagtgttgcaaataaaagatggcctttgttccatagtctttagtacggcagaccgtatgggtgagcttgtgtttcaaaaatagatatatacgctgaagataaatgaatcgatctgatatcaagttaggcttggttatcagatcgttttttttgtatttgtcacttttaatacaatcaatgatattgctgtttgctggaagaagaccgtttgttgaacaaatatccatttaaatgaatgatattctatttatcattcgggtggtattttctaattttgtgatgtgaaaccattgagaatgttccttataatggaactccttatcctaaattagcatatgaaaagcatatctatttttttgttcttgcttattactttggcatcgaacgcccaagataataaaacctccggactcaacgcccgccagtttcataaatactggaaagtagagtccgaatctccggattataaagtaacctttcgtggtgataccgctgaaattctttctcccaaaggcttaactctttggcgaaaagaaaagatgagtggcaaggtaaccattgagtacgatgcgtgtgtcgttgttgaggcagaaggcgatcgcttgagtgacttgaattgtttttggatggcttcggaccctcaataccccgataatatctggaaacgtgagaaatggcgtaatggcatctttctgaactgttattccctgcaactttactatatgggatacggtgggaatcataattctactacacgttttcgccgttatgacggcaacgaagcggctgttacaaatgcaaaagcccgtcccgcaatcttgaaagaatatacagatgccgaccatttgttggaggcaaacaagtggtatcatatcaagataacgaatgaaaataatagggttagttattatataaatggagtgcgattggtggatttccgcgatgccgaaccccttacggaaggttggttcggctttcgtaccaccttgtcccgaactcgtatcgccaattttcattatgaatgttcgtcgcaggaaacttctgaaataccattacactggatcggtaatactccgcagcaaaacaaagcggtaagtctgggagttcccttcaatgaaggagaattatacccggagcacactttgcagctgatgaccgataaaggtgaaatgcttccgacagatacttgggcattggcctactggcccgatggttctgtgaaatggaaagggatagccggagttattccgaaaaatacggagaaactgctactcaaaaagaccggaaaaaagtcaaaagaaaaagcatcttcaaggactgccgatgatcgtagcaataaattatccctatctgttgttgaaacacctcaaagtatccgcatagagacaggaattatttccgcttacatccctcgtcagggagattttctgatcgacagtctattccgtgaaggagtgaaggtcggtgaaaaagcacgccttgtatgtaacactcaaagcgaaccggtacttgaaaatacttctcaaatcgcttttaccaactataccggaacattgacatcggccacagtagaacgtaccggtaaggtgcggacactcgtcaaactggaaggcacccacagaagtgaaaccggacgggagtggcttccgttcgtagtccgtctctacttctacgccggaagtgagcagatcaagatcgtacatagctttgtgtacgacggagatcaaaataaggattttattcgttccttgggcattcgtatggatgctcctatgcgtgaagccctttataaccgtcatgtcgctttctcctgtgccgatggaggcgtttggagtgaaccggtacaaccgctggcaggacggcgtaaactgacactcggcaaagaggatacactttctctgcaacagcaacaaatggatggcaaacgcatcccgccttacgaggcttttgacgggaagaatcgtgaccttcttgataactgggcttcatggaacgattatcgcttgtctcaactctctgctgatgctttctccattcgcaaacgtgccaatgacaataatccttggataggaactttctccggcacccgtagcggaggctatgcttttgtcggtgatattacgggaggtttgggactctgcctgcatgatttttggcagtcatatccttcatccctcgaaatatcgggtgccaaaacttcatctgcaacgatcacggcatggttatggagccccgaaggagaaccgatggacttacgtcactacgataatgtcgctcatgatctgaatgccagctacgaagatgttcaggagggaatgagtactccttatggcattgcccgcaccactacactcacacttattccacagaaagggtatgcaggaaaagaagcttttgccgatgttgctgaatcactctcagaaccgggaatattgctgcccacgccggactatcttcatgcacagcaggctttcggcgtatggagtcttccggaccggagtacttcttttcgtgcgcgggtagaagatcgcctggatgcatatattgatttttatcgtaaagccatagagcagaataaatggtatggcttttggaattatggagatgtgatgcatgcttatgacccggtccgtcatatttggcgttatgatataggtggatttgcctgggacaatacggaactggcttctaatatgtggttgtggtacaacttcctgcgtacaggtcgtgaagatatctggcgtatggcagaagctatgacccgtcatacagccgaagtggacgtttaccatatcggaccgaacgcgggattaggcagccgacataatgtcagccattggggatgcggtgccaaagaagcccggatcagtcaggctgcatggaaccgtttctattattatctcactaccgatgaacgttgcggtgacttgatgactgaagtaaaggatgccgatcagaaactatatgaattagaccctatgcggctggcacagcctcgcagtgaatatccctgtacggcgcctgcccgactgcgtatcggtccggactggctggcgtatgccggaaactggatgacggagtgggagcgtacaggcaacactgtttaccgggataagatcgtagccggaatgaaaagtatagcagccctgcccaaccgtatctttacgggacccaaagcgctgggtttcgatccggcaacgggaatcatcaccagtgaatgtgatcccaagctggaatcttcgaatcatttaatgactattatgggtggttttgaggtaatgaacgaaatgatacgtatgattgaccttcccgaatggaaagacgcgtggctggaccatgcggcacgttataagcaaaaggcgtgggaattgaatcatagccgtttccgaatatcccgtctgatggcatacgctgcttaccacaagcgggatgcactaatggcaaaagaagcatgggaggatttattcacccgactggaacatacacctgcgcctcctttccggatcactaaactgtttccacccgaagttccggcccctttggatgaatgcgtcagcatcagtacaaatgatgcggcactttggagccttgatgctatctatatgcaagaggtcattccgatggatgaataatagctagaagaaagcggttaatgcactgtcagtgaaatgcattaaccgctttatgaatatatcagatgagtctgtctcttatttcaagttctgtttcaacgggcaatcagccattttcagtccatctgcgatgcttttggcattcatgtgcgctcctttcaaagaagtatgcgtatggtcattgttataataatctgccgctttcttgatacctttcttttcgagcttgtcagcacttattttattcaggtcgataaaataggctccggtagcttcggcagcttcgcgtgtccatttgccgaaggaggcagtgttgcgttctatctttccgtctttccacttattgcgtggggtatggcttaaaacgataggtatcgcacccttttcctgaacgtccatgataaacttcctgagataccagccgaaagtataaatgacttgatatttacctgttttctccattaaaaatactttgctttcttctccggagccgggcaattcggcacgggcttttccggtatttatctctccagcgtcattgtgtccgaactggataagaacaaagtctcccggttggagtgcatgatatactttatcccagcgaccttcgtcaaggaatgtacgggcgctgcgtcctgccatagcacaattctcaacagatatcttattcagatcaaactcatctgctatcacgctgccccatccccacataccgtttttatcgttatctttatttttaaccgtactgtcgccgatggtaaacaataccgggcgtccttctttgcggctcgaaccggtagcctcatccttttcaacaggtttcagatactttgccaattccagcccttcgcaggcgcgtattccgtcagcggcagattcggcattcactttggcaccaaaagcgctggtatgaatgcggtcgatatagaacatatatttcactttattcttgccgaatttctcaaacttgcgggcgctgatatcattcaaatcaatgaaaggaacattctgttcttccgctacttgctttgcccacaaaccgaatgttttgttgacacgggtaatgatggtgctgtctttgtctgcccaggcattgcggggagtcagggagaataaaatcgggtgtgctcctttggcttttacatcgttgatgaaacggcgcatatattctccgtaggtatatacagtctctttgactccggtttccttgattgtcacattcagactgtccttgccgattcccggaatggaggcgcgggcacgtccgctgtcataggggccgttatcattgtgtcccagttcgatgattacccagtctccggcttgcacgcctttgattacatccggccagaggcggttgtagaaggtgcggctgctagttcctcccaaagcatgattctcaacggtgattcggttggagtcgaaataatctcctgcgtaatatccccagccccattggccgttgttgccgtttcctaaagtaccggtgcgcatggtagagttgccgaccaggaataagaccggattgttacctttacggcttgctccggcaacggggcgtgccgtgcgtgctttattcagactgtccagtgtgttgtctaccacctgattcacatctttcattggagaagcaatgttgttttgtgcctgcatctgcaagctgcatatgatggctgtgagccagcataagcagtgaaataccttgtttttcatttacctgataaataatgctcttattttaacttgtaaacttctgtacctgctaataggaaacatcctacaccataatcttcaaaatcgggaacacttttgtaagttaccggctgcccgtctttcggttctttgcctgttccttgtacatagcccaagaaaccattcggatgaactgcctcttttaccattgcattccatgctttcagtgcaacagggagatattctttacggtcgagtaatccgttgcggattccccatgccattccgtatacaaacaaggctgtgcccgaagtttctttacctccgaaattgctttcatcgtggaggcttacgttccagaagccgtctgtacgctgacattgcttcaaggctttgctcatggtcaggaagtcattgatatagtcctgacgatgtgtttcgtcagcggggatttcatccaatacacgcacaagggctgcatatacccaaccgtttcctctggaccagtagcagttcttgccgttcggctctttgtaaggaggatcaaaatcctgatcgcgccaccataatccttctttggcattgtacataccggcttctccttctgtgttgcgggtataggaatacagatcccacattttgtcatagtacttttgttcgccggtcatcttgccaaacttggcataaatcggcattgccatttgtatagcgtcaatccagtcccaatcatttacttgcggagtatttacgaccatatcgatgctggcttttatattccggatcatgttagggtcggagggacacatattatataggtcaatgtaaacttgtccgcagcattggtcatccgcattgcgggtcgtgtttccattacgcattccccatttgtggaaattcgcccaatcgtatgtatagctataataatcttcgcgcgggtaaatgctatataaagctatcagcccttcataatatactccgcgagtccagatattgctggggcgaactctgccaaaaaacgagggtagggtataatcggcatactttttcataaagtagtcgtttacttttacgatggttgccaaagtctccttttgttcgggcaactcttgcgcaccggctgaaccggcagacatgctactcaggagagttgctgtaataaatgagaggagtaatttcttcatggtataaaaactgtttataaataaaattagctactataattgatttcacgggcaaagataggggaatcttttttcctcttcaatggaatattgtccacaagtatttaaatttgtccataatgccttcggaaagggagtgcgatggttaaaaaggcaatttatacatagatttgtacgatattctattttatgggtagaccatatcgcttacttttgcacgacgttattctaaatatgataagaacactttgattaatgataaaactatgaaatgtacaagcatcttttttagtttgttggtaatagcgacttttgtagttgcccagccaaactatgattttactaaactgaaacgagaacatttaggacgtggcgtaattgccattcgtgagaatccgtcaaccgtagtcgtttcttggcgctatctttcttctgatccgatggacgaatcctttgatatataccgggatggtaaaaaggtgaataaacatccgctgaaaaatgcaactttcttccaggattcttatcagggaacagaacctgcactctatacggtaaaagctataaaaggtaaaacagaaagcaattatcaactgccggcagatgctccgacaggatatttaaatattcctttggtacgccccgagggaggtactactccgtccggacaagcatacacttatgctccgaatgatgccagtatcggtgatgtagacggggatggtgaatatgagattattttgaaatgggatccgtccaatgcacatgataacgctcatgacggttatacgggaccggtgatttttgactgttataagttgaacgggcagcagttgtggcgtatcaatatgggacgcaatgtacgcgccggtgcacattatacacagtttatggtcttcgatctggacggtgacggccgtgcggaagtggtaatgaagaccggagacggaacagtggacggaacgggaaaggtgatcggtgatgcgaatgcggattatcggaatgagcgaggacgtatcttgacaggcccggagtatctgaccatctttaacggactgaccggagaagcaatgcaaacgattgattatgtgcccgaacgtggcaatctgatggactggggcgacggacgtgccaatcgtagcgaccgttatctggcttgtattgcgtatttggatggagtacatccgagtgtggtgatgtgccgtggatattatacacgtactgtattggctgcctatgactgggatggtaagaatttgaagaaccgctgggtattcgacagtaataatcccggttgcagagcttatgccggacaaggaaaccataatcttcgtgtaggtgatgtagatggtgacggctgcgatgagattgtatatggacaatgtacgatcaataacgatggaaccggactttattctacccgcatggggcatggtgatgctatgcatctgactcactttgatccttcccgtccgggattgcaggtttggagttgccacgagaacagaagagatggctcaactttccgggatgcagctacgggagaaattattttccagataaagagtaatactgatgtaggtcgttgtatggctgctgatattgatcctaatcatcccggagttgaaatgtggtctttagattctaaaggtgtcagaaatgtgaaaggggaagtgattgcttccagagtcagaggattgtctacgaatatggctgtctggtgggatggtgatctcttgcgtgagttgctggatcgtaatgtagtcagtaaatataattgggagaaaggactttgtgaacgtatcgctgtttttgaaggtgctctttctaataacggaacaaagtcaactccttgtctgcaaggagatattgtaggagactggcgagaagaagtattgttacgtacagccgataatacagctttgaggctttatgtctctaccattcctacggactaccgtttccatactttcctggaagatccggtttaccgtatcagtattgcgactcaaaatgtggcttataatcagcctactcagcccggattctattttggtccggagttgcgtggcactatattcagaggatgtaaaatacctaaaaagtaaattatgaattatcgtatgatgaccgttgctgcgttattggtagcactacctgcctgtgcgcagaaaaagaaagcagtaatcaatgattcaaatacccccttgcatttactgcagcctgcttatcagggtacttatggtgatttgacccccgaacaggttaaaaaagacatcgatcgtgtttttgcgtatatagataaggagacaccggctcgtgtagtggataagaataccggtaaggtgattacggattatactgcaatgggggatgaggcgcagctggaacgcggggcttttcgtctggcaagttatgaatggggtgtcacttattccgctctgatagcggctgccgaaacaacaggtgataagcgttatactgactatgttcagaatcgtttccgctttttggcggaagtcgctccgcatttcaaacgtgtctatgaagaaaaagggaagactgattcgcaattgttgcaaatcctgactcctcatgcgttggatgatgcgggagccgtatgtactgccatgattaaattacggttgaaagacgagtctcttccggttgacggattaattcagaattactttgattttatcatcaacaaagaatatcgtctggcagacggaacgtttgcccgtaatcgtcctcagcggaatactctttggctggatgatatgtttatgggcattccggtggtagcgcagatgagtcgttatgataaggaagcgaagaataaatatctggcagaagccgtgaagcaattcctgcaatttgcagaccgtatgtttatccccgaaaagggattgtacagacacggatgggtggaaagcagtacggatcatccggctttttgctgggcacgtgccaatggatgggcgctgctgacagcttgtgaactgctggatgtattgccggaagattatccccaacgtccgaaggtgatggattatttccgtgctcatgtgcgtggagtgacggcgttgcaaagtggagaaggactttggcaccagttgctcgaccgtaatgattcttatctggaaacttctgcaactgctatctatgtatattgtctggcacacgccattaataaaggttggattgatgcgatagcgtatggtcctgttgcccagttgggatggcatgccgtcgccggaaagataaatgaagaaggacaggtggaaggcacttgcgtaggcaccggtatggctttcgatccggctttctattattatcgtccggtcaatgtatatgcggcgcatggatacggaccggtgctttgggcaggtgcggaaatgattcgtttgctcaacacccagcatcctcagatgaatgacagtgccgtgcaatattatcaggaaaagcagaagacgacagctcctatctttgcggtggatagtgaataaataaaagattaactttaaaatataggaaccatgaaacgagaagcattcaaaatgtatctgaaaccgggctatgaagcagaatacgaaaaaaggcatgccgctatctggcctgaattaaaagcactgctttcaaaaaatggggtgtcggattattctatatattgggataaagaaaccaatattctatttgctttccagaaaacagaaggagaaggaggttcgcaggacttgggcaacacagagattgtacagaaatggtgggattatatggcagatatcatggaagtgaatccggacaattcaccggtttcaataccattgccggaagtctttcatatggactagaacccttagacagaattgatatcagggggatgtttgattaaaaaacaagcatcctcctgatactatttatggattgtttctttattatttcaactatcttgactatttttgtctggcatttatcattaatcttagaatctatatgacacagaggcgcatattacttttcacattgttcatgactcttgttttcaatgcggcttacggcggcattgaactccgttccaaacaaatgagaacaagtgacggacttccgaataactcagttcggtacctgtatcaggatagcaaaggcttcttgtggttggctaccctaaatgggttaagccgctatgatggcaactcttttctgactttccgtccggaaatcggtgataaagtctctttggctgataatcggatttatgaccttaccgaagacaaaaatggttttttatggatctctacaactccggaattgttcagttgttatgatttgcaacgtgcctgttttgtagactatacggggtctggtgcgctggaaaagaattattcgtctatatttgttgctgctaatggggatgtatggctcagacattccggcaatggttgtctcagaatggtccatcagaaagacagacagatggtgtctacggaatttaagacggagcgtggaaatcttccggataaccgggtacagtttgtaaatgaagatgccggcggacgaatctggatcgggacacagcgtggcttagtttccgtatccgacggacagtataaggtagaagacagattactccattttacttcttctctggcattcaagaatgatatgtattttctgacagcggacggagacatctactgctatcagactacaaagcaaaaactgacaaaagtcggttcgctttctgctgttgcgggtaagacgtcacctacgggaaacttcctgttgaacgataaatgggtcatccttaccaataccggggtttttaactatgatttcaatacacgcaagatcagtgtggactctggtctgaacatcagaaatggtgaagtgatttgtgataatcatggtgacttctggatatataatcatacgggatgtgtcacttatattttggccaagaatggagcaagaaaagaatttcagttgatacctgaagataaactgggatacattgattatgaacgttatcatattgtccatgattcccggggaatcatttggatttctacttatggtaacggattgtttgcctatgacacgacagaggataagttagaacattttctggctaatataaatgatcagagtcatataagttcggattttctgttatatgtgatggaggatcgtgccggaggtatttgggtaagttcagagtattccggtttatcccgtatttcagttctgaatgaaggaacctcgcgtatttatcccgaatcccgtgaattatttgaccgctcgaatacgattcgtatgttgactaaaatgccggatggggatatttgggtcggaacacgtaaaggcggattatatacgtttgactcgaatcttcattccaaaatgtccaatcagtatttccattccaatatttatgcgatagcagaagataatcaaggcgaaatgtgggtgggaacccgtggaaatggattgaaggtcggagattcatggtatcgcaatgaagtctcggatccggcttcgttatcagaaaataatgtcttttctctttttcgtgaccggaaagaccgtatgtggataggtacctttggcggtgggcttgaactggcagaaccgacgactgatggcaagtataaattccgtcattttttacagcagaagtttggtctgcgtatggtgcgagtaatagaagaagacgataatggaatgatctgggtgggcaccagtgagggtgtgtgcatctttcatccggattcattgatagctgacagtgacgattatcatctgttcaattatacaaacggtacattttgcagcaatgaaatcagatgtatctaccgtgatacgaaaggacgtatgtgggtggggacatctggctccggcttgaatctttgtgagccggaagataattaccgttcattgaaatatgaacattacggaacctctgaaggattggttaatgatgtgattcaatcaattttgggggacaataacggaaacttatgggtagctacggaatatggtatttctaagtttaacccgactaatcattcttttgaaaattatttcttttcttcctatactttgggtaatgtttatagtgagaatagtgcttgtgtgggagtagatggaaaattgcttttcggcacaaattacggtctgcttgtcattgatccggataaaatacaggatagcgaaactttttctccggtggtctttacagatttgcatgtgaatggtacccagataaatcctactatgggggattctccattgaaacaatcgcttgcttattcggatgaaattactttgaagtattttcagaattcattcttgatagatttctctacttttgactattcggacagcggacgtacaaagtatatgtactggctggaaaactatgataagggatggagcacaccttctccgttgaattttgcttcttttaaatatttgaacccaggtacttatgtacttcatgtgaagtcatgtaatggagcaggtgtttggaatgaaagtgaaacaaccttgaagattgtcattgtgcctcctttctggaagacgaactgggctatgttgggatatgtgctgctgctgattgtaactttatattttactttccgtattgtgcgtaactttaacagtctgcgtaatcgtattaatgtggaaaaacaattgacggaatataagctggttttctttactaatatttcccatgaatttcgtactccgttaactttgattcaaggagcgttggaaaagattcaacgggttgctgatattccccgtgatctgatacacccgctcaaaacgatggataaaagtactcagcgaatgttgaggctgatcaatcagttattggagttccgcaagatgcagaataataagttggcgctctctttggaagaaacggatgtgattgctttcctttatgaaatcttcctgagtttcggtgatgtagcggagcaaaagaatatgaatttccgttttattccgtctataccgtcttacaagatgtttcttgataagggtaatctggataaagtgacttataacctgttgtctaacgcttttaaatatactccttcgaacggtacgattatactttctgttacggtagatgaagtgaagaagacattgcagattcaagtatctgatacaggtgttggtattccaaaagagaagcaaaatgagttgttcaagagatttatgcagagtagtttttccggtgatagtatcggagttggtttgcatctgagttatgaattggtacaggtgcataaaggtacgattgaatataaagacaatgacggcggaggttctgtctttaccgtttgtatcccgacggacaaaagtgtttattcggagaaagatttccttattcccggtaatgtcttgttgaaagaggcaggcgggcaggcacatcatttactggaactttcggaagaactaccggaaccggagaaaatagcagagcctttgaataagcgtaaagtattgattatagaagatgataatgatatccgtgaatttttgaaagaagaagtaggagtttattttgaagttgaagtagctgctgacggaacttccggatttgagaaggctcgtacctatgatgctgatttgattatttgtgacgtactgatgcccggaatgaccggatttgaagtgacaaagaaattgaaatctgattttgcgacaagtcatatcccgattatcttgctgacagcattgaattctccggaaaaacatctggaaggaattgaagccggtgctgatgcctatattgcgaagccgttcagtataaaacttctgttggcacgcgtattccgcttgatagaacagcgtgataagttgcgggagaaattctccagtgagccgggaattgttcgtgctgccgtatgctctactgaccgtgataaggagtttgccgaccgattggctgttgtactggaacagaatctttctcgtccggaattctctattgatgagtttgctcaattgatgaaattaggacgaacggtattttatagaaaactgcgcggagtgacggggtattctcccaatgaatatttgcgggttgtacgaatgaaaaaagcggctgagttgttattgtctggtgagaatctgactgttgcggaagttgcttacaaggttggcatcagcgatccgttctattttagtaagtgctttaagactcagtttggggtagcgccgtccgtatatcaacgcggtgaaatgaaagaacagggagaaaatgagacggcagaagcctgagtaaccaagctttctaaatggtagtttaaatcttctctgtagtgcccgatgtgaatgatcgaccttgtatttgtgtacaatagtctatggtcgaatagtaaaagtacccttatttttgcaggagaatattactataaaattaaaggatcattgatcatgagaacactcttttttatcttgttttttgtattaggcttttgttatattcaggcgagagggcagaagcctgcacatgttataataacagctggtcagtcaaacacggatggacgagtacctaacaatcgtttaccggattatataaaggcaatggctgtggatagtacgtatactgcgggagcctacaaatattgccatattgcccataatcgtacagatggtatgtttgttccattttggccattgagtcatcctaaaagtaagccttatacgtggggatatgatgcgattgcttattattggttggaacagttgtttcaggaagatttttatgttatcaagtgggctatcggtggcactgccatagctgctcctgttactactccttttcggggaacttactggtctgccgacccgaaatggttggcagagaatacagctatcagtgagaaaggaaaatctttattactttctttgattgccaatattgatgcgagtattgatcagacactttccaaactaaagcaaggttatcagattgatgctttcgtttggcatcagggagaaagtgattatgagcacggaaaagaatattatcagaatctgaaaggagtagtttcctatgtgcgtaaccacttgacggagaaaaccggaaaagattactctgaacttccatttatatttggtaccgtatccaggaaaaacaaacggtataatagtgatgttgaggaaggaatgcgtcgctatgcaaaagaagataagaacgcttatctgattgatatgtcggaagcggaactaatgggagataaacttcattttaatcaggtttctgccgagtatatgggtaaacaggtatatgaacaaattaaaaagactctttcggatgatcctcatgtatatgtcgccaaatataaaggagacagagcttgtgctatcagttatacatttgatgatgggttggcggaacattcaactgtagctgcccctgagttggagaaacgtggttttagaggtactttctgggtatgcggctattatacggaacaaggtgcatctgcaaaggtacctcgaatgacttgggatgagttgcgtgaaatgtcaaagaaaggacatgaggtttccagccatagctgggcacataagaatgccaaacgattgactatagagcaagttaaatcggagatagaaaagaatgatagtgctatttatgctaatattggcattgtacctcgtacctattgttacccatataattataagacagaagaaatagtcagtacggcttctaaaggcagggccgctacacgtactaaacaaatttcaatcggaggaaagtcaactcccgaacggtttgacaaatggttgaaggatttgatgaaagcggaagattggggagtaggtatgacgcacggcattaattatggatatgatgctttcaaatcgccttctttattttggaaacatttggataaagtgaaaagtatggaagatcagatttgggtaggtaccttctgtgaagtggcatcttatatcaaagaaagggaggagatacaattgaaagtctctaataaaaagaatggtatgacaattactcccaagttgaaattagatagaaaactgtttgctgagccattgacgatggtgattcaagaggaaactatgaatggaattcaggtgaagcaaggcaggaaagaattacctgtgtatataaatgggaataaagttatgtttgactttaatccttatggaggaactattaaaattcatttcaattaggggtgtgtacgaataaagtttaccctgataataaaatcaataaaataatgaaaacaaattatctatgtggcctcttccttttatgtgtgctagtatggggaagattggaagcacacgctgagaaaccgctgaagactctggatctgtatctttgcattggacagtcgaatatggcagggagagggaaattatcaccggaagtgatggatactctacaaaatgtatacctgctgaatgcagatgatcagttcgaacccgcagtgaatcccttgaaccgctattctacgataggaaaaggacttagctggcaacaagtaggacctgcatatggatttgccaagacgatggctactaaaaaacatccggtaggcttaatcgtcaatgcacggggaggatcttcgattcgttcatgggttaagaatgccaaacagtccggcggatattatgatgaagcaatacgacgtgcaaaagaagcaatgaagtatggtacattgaaagcaattatctggcatcagggagaagccgattgtcatcatccggaagcatataaagagaagattattcagttgatgacagacttacgtaatgacctgggaatgcctgatttaccagttgtcgtaggacaaatagcacaatggaactggacaaagaaaccttatattcccgaaggtacaaaaccctttaatgacatgataaaagagatctccacttttttgccccatagtgcttgtgtgtcttccgaaggacttactccgttgaaggatgaaacggatcctcattttgatgcagcaagccagattactttaggcaaacgctatgctaaagaagttaagaaactaataaagaaatagctggtcgtttcagactacactcatttctgtttaaacatatacataggaaatatttatccattgttattgtcacttgtcacttttctgatttaagtgttttataataaagaagataggggtgacaatagagggtgataataaggtgacaatagaatgtatctttcattcttattgtcacctctccttgatgaatcttttatttaaagtcttgattatcagatgatagatagtcagcttgagggttttgcctgcatgtgttaaaaacatcattttgggcgtcaatgtacgctgtttacaccttaatgtttccaaggtatgctgcttacattaagaacaaagcccggtaaccttaatatgcaagcaaggtttgattaatctgttaagtcggttttatgtcttcgttccatgttcatgaaccgttcggctcacgtacgtaaacccaatggctcatgtacgtagactgatgggaccacgtacatgaaacaatctattgttactgaccggatacattaatctagcctgcataatagcttactgaacggttcattgacggttgtttctccgtactaatcttttgttcctatggggcaatatggtttttgtgacaccttcttttacatatctcctttatggtgggagaaaatgttttattctatttgattgcttccagaaactctatttcaataattctcagattagcattattcttgttcgcttttgcttcgagttccatatcatttgctgcttttgccgcaacttcagtgatctgtccgaaagcatcctgatcgctggtattacctttcagacggatggtaatttgtttggaacgtaccggcttttccacattaagatgaacataccccaggcttttattcgtatctccactccagatcatagtattgccggcaaatacttccaaaggataactacgtgaacgccatccattcaacttaatacagatatcatctatttctgcttctttttcaagagtatatgtaatccaggcggtgctgagttttccgtcattcatccattcgcttctttcattatcgtcgaagctttggtttacagtttcattgttggctccggctttagcggatacaatacgtatatcacgttttgtgtctttgtaagatggggtaagaggtgtttcacctttatccagatttcctttcagagtcatctgaggcaaataagtactcaatccgttgctaactttgacgggaagggtttctaatgtaattgtagcgctggggagcccttctgctttagcggtcagagtgatcttgccggcttgggtagtgctgcggataagagcacggttaataccacattccacagggagattggtattaagaatataattgtcttttccttgtgcgatgcctccgcgccattcggcattccctttcaagtcgaattgaatggtacggttgtcaagcggacagcgtttcccatccttatctaccacttctacctgtattaatgccaggtcggctccgtccgcgtggaatccttccggattttgtatcgttgtcagtttcagtccggcaggttcaccaaccgtgcttacagcatagcggcttatttccttaccggccttgttgtagctgactgcttccagtttaccggctttaaaagccacattgtcaaaggtgaacaggaaattgtattcgcgtttgccttttcctagtgactgaccgttcaggaacagttctacttcttcacctgtagaaacgacatagaccggttttactgtatttgcgggatagttccaatgaccgatgatataggtattgtcttcttctgtatctacccatccgttccacatgacctgatgtgcaaagaaagcatctttttcgatgcgcatagggtccgttactccacttctgcgatagttttcttcaccacggtggtgtgtgttggtatccgagaaaatgattttggcccctccggaactgactctgcgacctgtccccggacgctcacgccaataatcataccaacagcggatcattgctatcgccagcatgtcctgattgtgattgtagtctgttgcaggttggttacgatgtaacggtccgtctccttctttgtggaaaggataactgtattcatcccaatattttctcagaccttcgtcacgacaatattctgtagcccacatcggatgatgcacgctcttgttgatataaagcatttctccgccatattcagcttcacgaatgtccagcatttcacgagaaccaatagcacgtccgccgaaaggatcgtattggtcgcggatagctttcatttctatcatatgctctctgctgatacctttgtttccacattcataaaataagatacttggattattacggttgtagataatcgcatcgcgcattagttctgtacgctgatcccattggcgtcctgtacggtctttctcggaatctcctgccggcatcgcctgaatcaggcctacacggtcgcaggactctacgtcttgtttccatggggtaacatgcatccagcgtaccagattaccattgccttttactaccaggccattggagtagtcactaagccatgccggaacggacaggcctaccgccggccattcattactggtgcgctgtgcatatcctttcatctggatcacacgatcattcaaccagattttgccttctgcaaatcgtgttttgcggaaacctgtacgagtacttacttcatcaaagacttgattcttattgtcttttagaatcgtctggacagtataaagatacccatatccccaactccagaaatggagattatttactttggaagcagctttcactacccttgtttcgccaccttgtaaggttactttctcaccttcgaagcttttcacctgtttgccgtcagcatccagcaagaccacctggtagctaaattggcgtggttcacgactgtcgttttttacttccgattctgcatggatggtggcagtgcgtccttttacgtcgatgtctttagcataaatataaactccggtagttttcagattactgtataaaggaagagtctgatacacttcatctgtaacgtacaagaatacattcttgggcagaccaccgtagtttgcgttgaagttacggtcgttccactggaacttggagttagtacttttttcgcgatacatccagtcattgtccgtacgtactgccagtacattgtcaccttctttaatataaggtgtcaggtcgaagcctgccgccattactccgttttcgtgttttcccagatattgtccgttcaaatagaagtcaccggcttggcgcactccttcaaattcgatgaatactttttgttttttaccggaagccggaatccgaaagtgtttccgataccataccactgtgtccgtcagctgttcgatggacactttgaaggcttcatcttcattaaaggcatgcggtaaagtgaccgctttccaccggctatcgtcgaattgagattgtttagcttcgggaaagtctccgatttgcagacgccattcactgttgaaattgtattttttgcgttcgaaagcgtgactatcaacaatagccagcactgcaaacagaaatacaaatagaaagagtttgtttctcatgatttcttaatgattaatttttcattggcaaagaaagtacatcaatgaaagaaacaccccttaaattagtacggaaaacctgtaagatcatacgtcggcatcatttatgggttcattttcatcttcagacagctttttccgataggcagatggagataccccgaattggttcttgaaacatttactgaagtagaacggatcgttgatacctacgctataggcgacttcggctatggtgagatcttctgtcaataacatttcagcagcctttttcatccgcatgacacgcaaatattcgtaaggagaataaccggtcactccccgtacttttttatagaatacagtacgtcctagtcccattattccggcaaagtcattgaccgaaaaatcggtatcggtcatgtgctcattcaatacttcattcagctttaccgagaacttctgatccttgtcattggtacagataatggaatgagccaatcccggttcgttagaatatttttggcgcagtttatcccgtagctcgattaacttgaagattcttgccagtagtaaagagacattgaatggcttcgtgatatacgcatcagctccggattcaattccttcctgatatttctcttctatattgagggcagtcagtaatatgatggggatatggctggtggtaaattcatttttaagtttgcgtgtcacttcaaatccattcattcccggcatcagaacgtcacaaacaattaaatcagcatcatacgtacttgctttttcaaaaccggatgttccgtcagcagctacttcaacttcaaagtaaactcctatttcttctcttaggaattcacggatatcagtatcatcttctataatcaaaactttgcgtttgttcaaaggatcgacaggaggctggaaagtatcctctgacgtttcatttctgagaaaatctttggagtgctgttcctcttcttcggttaataactgattgggaatcaggaaatctttctcctgatagatatcagaattagtcggcaataggacggtaaagacagaaccgcctccctcattttcatcataactgatattacctttatgtacctgtaccagttcgtgtgtcaagtggagacctactccgacactgctatgagagaagctgctttgcatgaaacgcttgaacagttcagaacgtttttctttgggtatgccgatcccgttatctatgacttgtatacgaagctgttgcttgtcttcctgaatatctattttgaatataatctttccgttagaaggagtatacttgaaagcattggataggaggttgtaggtaaccttgtctaaattgcctttatcaataaacattttataagcaggttgtgacggctcaaaactgaaatcgatgtttttggactcgcttgtatccttgaaactcaggaagatttcataaaggaaagcaatgacgtccgtctcttccaaagataaggccagtttgtttttctgcatctttctgaattcaagtagctgattgatgaggcgtaacattctctgagtacttttatccatggtttttaaaggacgttgcatctctttgggaggattctctatattgattagcttgttgagagcaccttgaatcagagtaagcggtgtacggaattcgtgggatatattggtgaagaattccagcttatattcggtcaattgcttctcaacagcgatgcgattgcgtaatctgttgaaatttcgtatgatatggaaactgaaataacagacgattccaatgaataccagataaatcagataggcccaggtcgtctgccagaaaggaggagctatgacaatctccatagtgctttcttccccccatacgccggctacattgcaggctttcacttgcaactggtatttaccgggaggaagattacggtacgttgccaaattttgtgctgaagggatgctccattccgaatcatatggaggcatccgataagaatatttggatgctccgcttaaaaagttgaatgttgaaaaggcaatgacaaatgaattttgataatgtttcaagtttaactgccctgtataggacatggtttcgttgagaggggaagcatccataccgggcagcatatgcgctccattgatgtgaagccctgtgaatacggtcgatgcaagtttttccatgttttccactttattggcatcgagaactaccaggccgtagttcgtaccgaaaagtaatcttccgtcagcatttatgcaagccgtattttcagagtatacattccccagtgtatgtgaagaaaaataataattctctatttgcttggtggcgagggtgaagcgggaaatgccatattcggtcgcaatccacattttattgtcctgatcttcaacaatcgactgtatgactccgttgggcaatccgtctttaatactataacaatcgaaagtcagatgttggtagtcatttcccggatagcagatggcaaagcctgctcccgttgttccaatccacatatttccttcatgatcattcaccagacagcggatttcattgctggggaatgtttcattgacatgattgtaaagtacgtaattcttgggggagttgatcagtgagtccggatggaagatataaataccgttgttggtacccacccacatcataccgttgcggtcttcctgtatgacgcgtacccgtttttctccataactgtcttgaaagaaatgcttgaattgataactgttgcctgttttgacagccagattcaatcctccgccaaatgttcctatccacatccgccctttgcggtcacggtagattaagtagacattgtcgtttgataaggagttattatccttactgttatatcggtaccattggtcagccccgatacgtaatcctataccacgcatacccaaccataactgtccttcattatcttcgcacatactgtatacgttatgtgtaaacttctctctacgaagtatatttttcaggtcggcatcatattcatatagggtacccatgcggtttgccatatatacattaccgtttttgccacgtaaaagcatacgtatcgtgttggagcggtcagaagcatcttcgccattcggatagatacgtaacgttcctttattcagaatctccagatgagataatccggagaattcggaactcacccagatacccccggaacggtcttcaatgatatattgcagataattggaattgatatggctggagtgactgacttcaaaagtgaagtgctgcagatcgccggtattcagatcgtaggcaaagagtccgtttccgtaagtcgtaatccagatgatatcccgtgaatcatgaatgatagagtaacgttctacatcgatatatcccaaatgctcggatgaaagaaactgaaaatgtttgatgtcgccagtgctggtattgacataccatacgttgccggtatagttgtgtacccatgcattccctttattgtctctggtgacgttaccgtttttaatattcaggcgggagaaccggcgcagctttcccgtaacgggatctaggatgtaactgccagtggcggtaaacatcacccattgatgttgcaggcggaggcttccggtgattacacctgtatctccgagttcggttaatgaagcgattttctccagtcggttattggaaagagagtggcggtagatttctttttttccggtaatgatgcaggtatattggtcataagaaaaaatatgttcccagctttctccctgtgtatccattgcttccagtttgccgtcatggtatttccataatccttgcttggttcctatccatacatgtccggggctgtcattgctttcgtagacaaacagtaccttgtcagaagataggttgcctaattcttttttgtatgcctgcgacgagaactggccatcctgatagacgacacgacggcatccgttattgttatcccacaaccagatagactggtcggatgcaatgatttttttcgaatagctctgtttgtattctccgcaaccagtgaaatcgacgaagcgcccatgttttaaatcgtaacagctatataaagaagagagggtggcgatccataaaaaaccgttagagtcttcttccatattccggatgcgtgggtcggccaatgaaatcggcagattagggtccgggtagatactgacaaaagagttgccgtcataatagcttaatccgttgacggttcccatccacataaatcccttgctgtcctgaaacatatatcggatggaattattcgccagtccgtcaccggtggtcagtttgttcgaacgtatctcgacagatgcatgtactgaactgagatagaaagataagaatgcgaatatcagcagtgcatttttcatatttgatttctacgattctacattattattaatggttacaaagttaattttctttttagaatagaggatgtaatagcgtacggaaaaacaaagaaacgatgtattatcgttcattcttgatgtaaatctcaggtgaaatacgattttctaggctttgtgtacgcatgtacattctaaactataaagaaagctgtaatttagcggcatgaaaacggtaactggaaaaaacttccggttacagaatatttgtttagaggtagaagataagagtcaggtaataaagaagcacattaacaacagtaaaatggaaatcagttttcaataggttttaaaatataagcataatgaaaaagcatataggtattagtcttttttttatggagtgtttcctgtctctttcggctacgaattattttgtagctaccaatggtgatgattcaaatgcgggcacgcttgacaaacctttcgctactttacaaaaagcgcagtcaaaagtcgttcccggagatacggtatatattcgcggaggcgagtatcggatacgggaagagcagatgatgggaggagatcatttgcgcgcttatgtttttgaaatgaataaaagtggcactcaggccaagagaatctgctatacaggttatcaggatgaacgtccgatattcaatctgactgaagtaaagccggagggtaaacgggtatctgtcttttatgtatcaggctcttacctccatttccgcaattttgagattatcaaaacacaggttactatccgggagcatactcagtcggagtgtatatacaatcaaggtggaaatcataatatttacgagaatctggcgatgcacgatggcatggctattggtttttatttggtgcggggaagtcataatctcgtactgaactgtgatgcttataataattatgaccctgtatctgagaatggtaccggtggaaatgtggatggcttcggtgggcatccggcttctgcctcctatacgggaaatgtgtttaaaggatgtcgggcctggtacaacagtgatgacggttttgatttgataaaggcacaagcagcttatacgattgaagattgctgggcgttttataatggatataagcccggaggatttgtgggtgcgggagatggtacagggtttaaagcgggtggctatggtatgcgctcaaaagtgaagatgccgaatgagattccacaccatgtagtgaagaattgtctggcatataaaaacaagaacaaaggattttatgccaatcaccatttgggaggaatttcctggttcaataataccggttatcagaatccgtctaatttctgtatgctgaatcgtaagtctgccggagaaatagtggacgtggacggatatgatcatattattcggaataatttgtcatataagccgagggctgcaggaaaacatattgtcgatgtgaatcgggaggaatgtatgattatcaataattcttttcttcctgtagatatgaccgtaggtgaggatgattttgtaagtttggatcctgctcagttaacattgcctcgcaaagcggatggaagtctgccggatattgattttctgaagttaaaaagaaatagtaaattatatgatgcgggaatcggttttcaattctctgcgcagaatctttaaaatattgttctgttattgaagaaaaatagctgcatgatagatctatgttgatataatccgcatagatctatcgtacagcttgaagaatgagatctttctgtagattcagatattagagaataagacgtttgatctcctcagcggtatctacaatatattgaggactgaattcttccagttcggcacgtgggcggaatccccatgttactccacaaactgtcactcttgcattagcagccgtttgcatatccacgccggaatcacccacgtacagcacttcttctttggttactttggcaacttccagaatatcgaatacaacggttggatcgggtttaacctttatcccttcacgttgcccgaacacagcggtaaaatggatttccggaaaataatggtcaatcaatttttgggtggctgcctgatatttgttggaagccacagcaatttgaatacctgcatcctgtaagtatgagagcaattccggaataccgggataagggcggctgtcatcggcattatgaatgtcatagtaagggacgaattccttgcgtacgcgcagtacattctctttggacttttctccttccggcaaggcacgctcaaaaagtttgtcgatgccgtttcctaccatgaagttatatttctcgatctcatgtgtgggatatcctaacttattcaaggcataatttgtactgtgtgcaaggtcggcaatggtattcagtaatgtaccatccaaatcgaaaatgactagtttcttcattgaacttcttgtttttttatgttaatcctgttttcctttctttctgcttacaaagataggaataaaaaacgaatcatttccttgtaattcggaaccagtctacatctgtccatcctccatcattggtaacaatagccggacgggtacagaacatgccgactttggcgccaatccattgtccctcccttgcctgaaaagggttgcctaatggcaagaacttctttccgtcaaggctataactgaagttgcacatcacaatgaggtcgttacctccttcactggctttaattttcttgccgtcgcaactgaaacgtacctttaggtataccgtgttttgggtaagaccgacagaagagtttacctgttccgcttctcctttatctgcttttttacattcaatttgagacagcacaagacctttgtccgtattttccagaatcaatcctgcataatccctgcccattactaccaaacctgtacgttcacctttcagttttggattaggcatgaaggtcagtttcattgtggcggtgaaattgtccgaaggagttttttgcaacaacagattagctacatcccacaaattcttataatccgctactaccggataagagtatagtctgacataacttttgtctccggcataatatgcccatttctcattgatattagcgtgccactgccattgcggagagagtatatatccgtcgaattcgtcgctttcttgcggtgtacagatgggatatatctttcctacattcggctttttgtaggtcattaccggttcgccgcaaccgtcaccatctttgtcgataccgattacaggccagtcattcacccacttcatcggttgcaagtgaacaaggcgaccataagcgcctacatcctgaaagtggaagaaccagtcttctccggaaggagtgtctacccaagctccctggtgaggtccattgacgggagaatcaccctgcgccagtacagttctccattcataaggaccatacacatttttagaacggagtactacctgccaaccggttggcacaccgcctgccggatggaagatataataatagccgttccttttataaaacttcgggccttcacacgtctggtgtgcttcgtgaccgtcgaagataatgcgtgagggggtgatggctttggtcgcttccttattcaattcacagatggtgattacacttttcagtccggcgcggcttcctgcataggcgtgtaccagatatacttttccgtcttcatcccaaagcgggcaggtatcgatgattccttttcccggtttaaccagaacaggttccgtccacggaccttgcgggtctttggcttttaccatgaaagcgccttgatccgggtctccccagaagatataaaactctccgttatggtggcggatactgggtgcccagacacggttgccgtgttccggacgttccggtgtttcaataggggtgagggcatagggaacagcagctccgataatcgtccagttcactaaatccttggaatgtagaatctgcaatcccggcagacagttgaagctggaagaagtcatatagaaatcatctcctacgcggcaagcgtccggatcggaataatcggcatagagcaccggattcttgtatttaccatttccgagatcggaaacccatacttcggatacatagtttttctgtgctaccgcagtgaaaacagttagcaggcaaaaagctaaagtctgtgtcaatcgtttcatgatataggtataatagtttgatattaaagattcagttgaagtctctcaatggggcaaaggtaaaaaaaagactccgcacaaaggagtaataattgtgcagagtcggtataaaaactggtaaatactccagtatttgattgtttaactgtatttgtatgctttgtttaatgaatatcttttattttgaccgttaccggatgtgccaattcttctttccattcgcggagataagcgaaccatgcttccggtgtcttatagccgaaagtctctttcatggaagtgaaagtggtgtgatactgtaagtatttgcttcccggagatgtgatggtgtagaggtagttgtctttgtctttctcttccgatttcacatatcgttggggaatgcaggtcccaagacctactgtttctttggcatatttcacggtatcgtttaccggccagtctgttccccaactgccgacaagccctttgtgatccgagtaagattctgcggtaccgacaatatcctgaacgcctgtacagaacacttcgttcttaatcggctcgtcgaagaatgcctcgatacgaagatcacggtgtccggcatagagtgtgtaacgggtcatcatgtccaattccgcattttgatatttccagcctgtcacttcgatttctgcgatgacacgcaccggaccgtaagagatgatacgttccgtacgggtagccaccggagtgatatgagttgctttctttccgtcccatcctttgaaagcacccggaccgcaactgtcgaatacccggaggacatcgtcaccgaatcctcttgctaactgttcgtcagtagggtagaactgagattctttgatttccagtcctttattgaacttaccgtagatatccggtgtctgtttttcgttaaagtaaagacgatagcctaccagttccgattccagtacaggaccatgaggacggaccatactatatatattacttgtaccagggacagtgattgcctgtactgactgatgctttccttttctcgggtcagcaatgaacatttccgcataaacccgtgccggataggttttcgtactcttttcagaagacagggttacctgaaatgtttttcttccgtgagcagggaggctggtaacgaatgccagttcatccatcttacggtctctgttcaggtcgtccagctgagaagggatttcagtgcttccttccattactacggcagactttactttaaatccggtatgcaagtcacgcaagttgattactaccggttcatccgtcttggcacggttccagttattgtttacttctacagtaatggttttctcctgtttttgagcccaggcggacagagagcagcacccgacaaggagtgtgatgataaaaatattcttcttcatgattttaaggcatgatattatacgtcgtatttctttctgcaaaagtaattgaaaaaatagcagaccggcttatctttggaagataaattagtctgctatttgagctttttactctatataatgattttgtggttttctgtggtggaatctcttatttgaaattcaatatctgtcctttggcgtcaatctcttcataagtctctccatcgactttcagattcttggcgcttttgacattcagtatattctttcctttggttgattctacataaatattttcgagtgtgacaccgtctacctgactgataacgactccgtcagtagcttccgtcatcacaacattcttcacagttacgttacggataggcatttccggaagtccgttgaagaacatcgcacgtcccgaacctctgcaaatgacatttgatatatgaatatcacggaacgcaggagtctcttcggttacaggaggaatcgccgtcttcatacggctcagcagatcttcttccgattcttctccggctcctttgccaccatagaacaggtcgaaaagtaacggttcgttcggtatattgatcatattgatgttattgatatagatgttttctacaacaccgccacgtccgcgggtacttttgaagcgcagacctacatctgttcccaggaatgtacaatcttctacatagatattcttcacaccaccggacatttcactgcctactacaaatccgccatgcccatgtaataccgtattattctttacgattacattctggcaaggttctccgcggcggcggccgttctcatctttgcccgatttgatacagatggcatcgtcacccgcatcgaatacactattcaggatcagtgcattcttgcaagattccagatcgagtgcatctccgttctgtgaataccagggattgattacctgaatattattcactgtaaagtcttcacatgacaacggatgcagacaccagctcggtgagttcttgaaagtgactccttccagcaaaatcctcttgcttttcacgaaattcagtaatacggggcgcaaccatgcacggatttcattccattcttcgtccgtgttgatgccttcgggcacattgaagtctttgcaggccattgcacctttcagcgaaccggcggtaggataccatattctttcctgttcatcgagtacaccacccgattttaccagtttattccattgcgaagctgttagtttttccttcttcaccgggcgccagcagtctccgtttccgtcaaatattccatatcctgtgatagcgatattctctgcattacgagcagaaatcggtgattgacagcggcgtgtttccaatccttcgaaagaagtggggatgataggatatgcttcaaaatcaccggtgaagagtatcagggcattgcgttctgtataaagattcacgttgctgagcagttcgataggtccggtcagccaagtgccttctgggatgataactttacctccgccacgttggtttacttcttttatagcatcgttgattgctttcgtattcagggtcatcccatcccccttggctccgaatttagagatatttacctcataggcaggaaaaaccggctgctgtactttcggcatttcgaaaggtaaattctggtaaatggtgtcatctattgcgttttcgcttattgcgcactcactttgtttgcatcccgagacaaacggcaaacaacatacgaccatccagaggagtcttcttgtcattgtgttcatttagtaacttttctatagggttatacatttattgtttttctggtattctctttcgatttctaagatggcttctcataactcttatctccctccgcaggcgacctctcgcaggcagcctgccggaaaggaataagacaaattcatgttaacctaattctaaccttaaaataaatattatgaaaaaacctcttaattatcattggcaaagataagggggaaacttcaggcagatgtggagttattgatagaatacgtgtattttttgtcatttatgtctaatatttgcacacttctcgtgtttttatgcagaaagatactatctttgcacaaaatttaactattagaagatatgagtaacaacttgttgaaaggaaaaagaggaattatcttcggtgcactgaacgaccagtctatcgcctggaaagtagcagagcgcgccgtggaagaaggtgcaactattacattatcaaatactccgatggctatccgtatgggtgaagtcaatgcattagctgaaaaactaaactgtcaggtagtgccggcagatgccaccagtgtggaagatctgacgaatgtattcaagacatctatggatatattgggtggacaaattgattttgtattgcattctatcggtatgtctcctaacgtgcgcaagaaacgtacttatgatgaccttgactatggaatgttggacaagacattggatatttcggctgtatcgttccataaaatgattcagtccgccaagaaactgaacgctattgcggaatatggttctatcgtagctttgagttatgtcgctgctcagcgtactttttacggctacaatgacatggcagatgctaaagccctgctggaatctatcgcacgcagtttcgggtacatctacggtcgtgagcatagcgtacgtgtgaatacgatttcacagtcgcctacctttactactgccggttcgggagtgaaaggtatggataagctgtatgatttcgctaaccgtatgtctccgcttggaaatgcaacagctgacgaatgtgcggattattgtatcgtgatgttctccgaccttacccgtaaagtgactatgcagaacttattccatgacggtggtttctccagcgtaggtatgagtcttcgtgcaatggctacttacgaaaaaggactggatgagtacatggacgaaaatggtaatatcatttacggataaaaggttatgaaactacggatctctcttcttactatattaataggtatgcttttcgcctcctgcggcttaagcacaggaaaggttgcggagcagaaggaagaagggatttctgttctgagatacgataagctgttgagcgaatatgttcgctccaacagcttttccgctatgcagaaactgacaatggactatcgtcagccgacaaagattctgatagaagatgtactgtctatcggtacggtgaaggacgacaccatttctcagcgtttgcaaaaattctactcggatagcaccttgcttcgtttgctgagcgatgtagaagctaaatatcccaatcttgacgaagtagaaaaaggactcaccaaaggattccggaagctgaagaaggaagtccccgatacgaaaataccatttatttattcgcagatatccgcattcaatgaatcgatcattctggtagatacattgctgggaatcagcctcgataagtatatgggagaagactatcctctctacaaacgtttctactatgactatcaatgtacctcgatgcgtccggaacggattgtgccggattgtttcgcattctatctccttagccgttacgaaatgaactatcatgaaggtacttgtctggtcgatctgatgatgcattccggcaaaatcaattatgtggtgcagcatctgcttggttatgacgatattggccaggcaatgggatactcggatcaggagaacgaatggtgcaggaagaatgagaaggatatctgggagtatatctgtgcaaacgatcatctgcacgcacgtgacccaatggtgatccgctactatatgaaaccggcgccgactgttgatatgctgggaggacaagcccctgcattgatcggttcgtgggtgggagcacggattatcgcatcctacatgaaaaagcataaagatcttaaaataaaggatctgttagagcttaccgattatcagagtatgttcgaagagtccggctacctgaaactctagcccatacctattacttattacctattattatcacctattacctaaagtggaaactgctctttacctgttgcccgttacattgggcgatacacctcttgaacaggtgttaccttcttataatacggagatcattcgtggtatccggcattttattgtcgaagatgttcgttctgcccgtcgctttctgaagaaggttgatcgggaaatagatattgattcactgactttttatcctttgaataagcatacttctcctgaagatatatccggttatctgaaacctttggcgggtggagcctcaatgggggtgatttcggaggcgggctgtcctgccgttgccgatccgggagcagatgtggttgccattgcccagcgccagaaactgaaagtgattcctctggtaggaccttcctctattattctttctgtgatggcttcgggattcaatggacagagttttgcctttcatggctatctgccgatagaaccgggagaacgggctaagaaactgaaaacactggagcagcgtgtctatgctgaaagtcagacacagctattcatcgaaactccttaccggaatcataagatgatagaagatatcttgcagaattgccgtccgcagacaaaactatgtattgctgccaatataacttgcgaaggcgagtttatacaaacccgcacggtgaaagactggaaagggcatattcccgaattgtctaagattccctgtatttttctcttatacaaataacatctttcaggtgttcgtattcatcttcgaagcaactgctgaaaaagcctttgcccatattttcttctatctgtttgaaactccatagcttactgttcttgaaacggggagtgcaaaggatagaatcatctttgatatcgacgatgaaaagatagatgagccggttggttgtttcattctcgaagtgatagacaatgttaaactccggcttgaagtcttccgttgcgtgtggaagcgcattgttcaccaggcggtttactccttcggtgagggactcaccataacggagatagcattccatcggtatgtcagttttccctttatcaaggatggcattcatcggtctgtcacaaagaaacagcatcccgtgagtagatacggctattcttatgaccggattgatataggcatttttatagttgagtgcttctatggcaagacttcttccgatgacatctcctttcgtattgactatgggcacgtattccgtgtgcgacatcagatggttgaaataccggatagcaatctgattgaacagggtactcatcacaaatacgacagggggaaataccttataaagtatcaccatgcttgtctggcttaaagggtcctgacaggcaacgacaatactgataataataaaatgcaggataccgaagatcaatgcaaaacgggccgaaacaactgccgcctctgctccttgcgcatacaagcgcttattgcaggagcctatctgtctcagaaagtggttgataaatctctttttatgcatatagagtatcagcatcggaatgaggatactgacttccagggtaagaggcagagcacctggcggaacatagtcaccgggaatcaaggctgcaagtgacagcagtgccagcattccggtggcaatataaagaataaaattaggaattagcgcacctttacggtgtagtaataggtatatccctacgatacctataccagtaccgatgtaaatagccgtgtcttgcgttataaattcacacaataaaatggaaataataacggggataaaacccaatgacatgttaaacgcggaagaaagtgttcctttatgatccatctttatgtttatttgccggttttacctataaaacaaatagtgaatgtgttttgttttctatcgaatgtgtttctctgcatgataagacgaacgaacgagaggagcactctctacaatgctgaatcctttctccaaaccgatggttttgtatgtggcgaattgctgtggcgtcacatactcggcaaccggataatgacggtgcgtaggctgcaaatattgtcctatcgtaagaatctggcagccgactgccagcaggtcgtccataatggtttccacttcctgtggagtttctcccaaccccaccataataccgctttttgattttgttccgcttcgggcgatgtgaccgatcacttgcaggctggtatcatagttggccgcactgcgaaccaggggactgatgcgtcttaccgtctccatattatgggaaatgatgtcgggattggcttctatcactaggtctaccagttccattctaccctgaaaatcgggtatcagtacttcgattgtggtctgcggattcagtcgtttgatctcacgaatggtatgtgcccaatgtccggctcccagatcgggaaggtcgtcacggtctaccgaggtaactaccgcatgatctagtttcataagagcgatagactccgctacgtgtgtcggttcgttggcatccagtggatgcgggcgtccggtttgtgtgttgcagaatttgcagctgcgggtacagatgtcaccgccgatcataaatgtggcagttccttttccccagcattctcccatgttgggacaacgcccactgctgcatatcgtatgcaggcagtgggagtcgacaattcttttagtttcggtgtaacggtcgttggcaccgatatttattttcagccattcaggcttgcgcactctgtcagccattacaaattgttcaggaagaagttggtcaatcgtgtatatagatgctgacgggtgttgccgccgtatatgccatgattacgattggtatatacttgcatatcaaattgtttacccaactgcaccagatgctcggcatattctgcacagttctggaagtgaacattatcgtctgccataccatgtaccagcaacagattgccgtgcagtttgtcagcccgtgtgaaagcggatgattctttgtatccttctgcgttttctttcggggtgcgcatgaaacgttctgtatatatagtgtcgtagaaacgccagtccgtaggtgcggcaacagctacaccggctttgaataccggagttccttcgctcatactcatcaatgtcatgtatccgccatagctccatccccagataccgatacggtctttatccacatacggctgtttgcctaaatagagagctgtttcgacctggtctttggcttctttcacgccgattttgagataagtgcacttctcgaacgcttctccgcggcctcctgtaccacgaccgtctacacatacaacgatatagccgaggctggccatgtaagtctcccagctgattccccaagtatccagaacttgttgtgaccccggaccgctatactggtacatcagcaccggatatttcttggatgcggagaagttgacaggcttcatcatccatccattcaaagttaccccgtccgtagtctggaaggtaaagaactctttttgcgggatagcatagccggctaacgtttgtttcaactggtcgttggtgataagcgtttttaaggttttgcctgtgttgtcattcagcgtaactagcataggagtatccagattcgagaatttgttcatataatacttcatcgatttgctgaataacggcgtattggttccttcacgttgagacaactttgtctttttgcctttcttatcaatcttgtagactgctttacgcaaggggctttcctcattgctggtataatagaaagagccgtctgttgcgtcataacccagaaaatccttcacttcatatttgccattggttactttcttgataaggtttccccccatgctgtaccagtaaagatggctgaaaccgtcacgttcgctaagcaaactgaaagtttccggatagaacttgatattatcgaacacgttctccttaatataataaggtgactcatcacgcaacactaacttgcagagcgttgagcgcggatcggcaaaataaaggtcgaaacgatcctgatggcggttcaatgtcataacggcaagtttgctggcatctttcgtgaagcggatgcgggggatatatccgtctgcatctatcggaagcttcatggtgcgggtcacgtgcgatttgatgtcgtacgtacgtacttctactttcgagttcgggtatccggctttcggatacttgtaggtgtattctcccggataatctttcaaaggagtaatctgcggtgcttctcccgcgaacatcggaaaagaataggaaggaacttccgactcgtcgaagcggatgaaagcaatcatggtattatcggcactgaactccagggcgcggttgaaaccgaactcttcctcatatacccagtcggggataccgttgagaaccatattttgcttgccatcttcggtcacctggctttcgctgttaccgtagagcagctttacgagaaatatattattgtcacgcacgaaagcgatcatcgttccgtctggagaaaagacggggacctgttgaggtccgccgtcggacagccgttcaataatgttgtttgtcgtaactcccttatcatttcgtttcaaagggtatatataatgcacagctgtgtatgaatgccggtatatcggggtcgttttggtagcgatcagtaatttgtcaccatcgggtgagaactgatagctgtcgaaattcttgaagtcacattcgcgtgcctggttcacgtcaaagatcacctctaccttttctcctgtgcggaatgagtatttgatgatttgcgtaccatcggcgttcatttgtgtgtagtgctctccatctggtgtggggatgactccctgaatattttccgggcggaagcgtccggaggtaatatcttttaaatcaagtgccttttgtccttgtgccattccggcgaggcagagaaggcagaggagcagggctaaacttacttttctcattttataaatcgttttatattttacttgtttaagggggttaagttcataccctgcaaaaataacaataaacttaaatacctcaaagtacatcctgtttttgtttgaattaaacccttattttcttacgccttttaaatttgtttagtatcggatgactgctgtttagttaaaaatgatgtattgcggagaaaaaagagtctttccccttgcattatcagaatgaaaagtgatatatttgtgatatcaaaataatatcaaaatttagtcctatgaatgcaaaagaatttcagtacaatgacgtggttattaatgggtttgtagccttgtttgttaatttggcgatactgcctcttctgattgtgatgagctttatcctttttaaaggaagtattgttttgttcctgctgttgatcctctttcttgcagcagctattctgatgattcccggatatttttctcaggaaccgaacgaagcccgggctatggtattcttcggaaagtacaagggtacctttaccgaaaccggtttcttttgggtgaatccttttatgaataagaaaaagctctctttgcgtgcccgtaatctggatatagaacctatcaaggtgaatgataagattggtaaccccattctgataggactggtgcttgtctggaaactgaaggatacgtataaggccatgttcgaaatcgatgcacagacgatggcggataataaaggaaccggacagatgagcgtaaccgttgccggacgaatgaatgcttttgaagattttgtgcgtgtgcagagtgacgctgctctccgtcaggtggcaggattgtatgcttacgatgataacgaagcgaattcggatgaattgacattgcggagcggtggcgatgaaattaatgatcagttggaacaccagcttaacgaacgtctggcgatggccggaatggaaatagtggaagcccgtattaactatctggcttatgctccggagattgcagccgtcatgttgcgtcgtcagcaggcttcggccattatcagtgcccgtgaaaagattgtggagggtgccgtatcaatggtacgtatggctttgcataaactttctgaagaagaaattgttgaattggacgaggacaagaaggcggcgatggtcagcaatctgcttgtagttctttgtgcggatgaggctgcacagccggtagtcaatacaggtacgttgaatcattaataaataaaaacagaaggtaagaaggtagtggctaaaaaagaatcttcaataaagagttttgttttgcgtgtagatgccgagacaatggatgccatcgaaaaatgggcagccgatgagtttcgcagtaccaacggacaacttcagtggattattgccgaagcgctgagaaagagcggtcggctgaaaaagaaatccgctaaggcagggaatgctccgtccgaatcttccgatcaggcataaccttttttagatagaattgataaggattattggaagatattcgatatctttgtgaaaagtactttaaatattaccgctatgaattcgaagagaaaagatttgcagtatgcttctgtcttcctgttggccgtagcattgacattcctgatgggaaaaggtgataacctgtggttgatatcatggggtgacttgataccgagtctgtttgtgctgttcattgcgggtgattgtctgcacagttccctgctccgtattaaacgtggcgaggaagcaggaggttcccgttggagtacctgctttgcttttctgatattcagcattgttttcatgggcgatttattcttcatcggccattttatcattgataaattactgggataataagggagatgtagccttacttttcagataaacaaccctatattcttgtgttatctatcggataaggtcgtgtgatataagttcaattgttatcgtgccactcgggtgaacagatcgtttcacccgggtggcacgatctgttcactagagtgcacaggcctgtgcactctagtggaacgatgaagatgtcggtaagaaaacagaggtatgtaagggagataagataaggatgtaggtaagagatgctaagaagataggtagtatcatctgtaaaggacagccggatgaaggtaagataacggtatactgtccgaaaaatcatgagagataagttgaaatagaatgagagtatgagagataaaaacataattcttttctgagaggctgggggaatggatggataaatcccgatagaatctgagtttaatgccaatatgtaaataggtataccttgccgcaattgttagaaaagaagataaactaaagcatttagtttactttaactatgaaaattagtttatgaactaaaacttctcgttatttgcagtaaacaatgttgtaaatatgaaaggattaacagtaaaagaagaggaattgatggggtatttctgggagaaaggccctttgtttgtgaaagaaatgttggctttctatgaggaaccgaagcctcatttcaatacgttatctacaattgttcgcgggcttgaagataagggattcctggctcatcatacttttgggaatacttatcagtactatcccgttgtcagcgaagaagattttcgtaaagggacattgcggaatgtaatcagcaagtatttcaataattcatatttgagcgctgtttcatctctggtcaaagaggaggatatttctttggatgacttgaaaaggcttataaacgaggtggaacaagctcatcagaaataataaagaataacacaatctaatacaaaacaatactatgcacattttcttcctcatatatatgttgaaaacagcgctttgtctgtctgttttttatttattctaccgcttgtggctaggcaaggagacatttcatcgattcaaccggatggtgttgatcgggcttatattggttgcatttgtcattccttcgctcaaagtttcacagaacttccatttaccacagattgagcaagtgtttgaacgtctgaatattccggaagaagaaacggagcaagaacatgatttgcagaaaatggagcaggtcacaacaactacgttacatacacaattagagaaagaaaggtctgatttcactattttgacccttggcaatttgggatttctgtatctgggtggagcattgctgttattgttgcgttacatattttccatagcatgtatataccgtttgattcgtaacagtgagaagaagtgttggaaaggaaaaatcagattggtggtccatcagcaaaatgtggcaccgtttagttggagacactatattgtgctatcccggcaggacttggaggagtatggcgaagaaattatagctcatgagtatgcgcatatcatgcacaaacatttccgggacctattattggcggagatttgccttttgttccagtggtttaatcctgcaatgtggctattcagaaaagaattgaaaactgtacatgagtttgaagcagatgaatcagttctgaaagcagggattgatgcaaagaaatatcagcttttattaattcaaaagactgttggaacaaggctgtattctatggtgaatagttttgatcacagttcacttaaaaaacgtattactatgatgttgaagaaaaaatcaaatccttggaaattatcaaaatacttgatagtatttccgttggcagctattacagctgttctttttgcccgtccgaatcttctgaatatgaataatcaggagggaaatgcattcatacaggatacattggatgtgagacatttcgaagagattctggtttctaagagttatgcagaatcggacactgtacaaattatagaaatcgatactctaaaaatgcatatccctgtgggatatgcaggatggtcaatttcggaatcaagttctgatgataatgtcatcagttatcggaaaggtgtttaccaaaaggagaaaggaatactacgtttgtcttccactactccgtggacagaaagtgacttggcggattttgttcatcgggtaaaaaaaggaatgcttaaatcgttgaatgaactctatggagttaaaaagcagcagaacgctcatcctgcacttgctcatgaagtgaagacctctcatactgtgaagtgcatttattatgtgaaggatttctttaagatttattgtacggatggaggaaccgggcatgatggacagcttattcttttggatggaaaagaaatttcttaccagcagttgaagagcttatctccggatgatctgttgcatgatgtatgggaaattttgccggagtcgacgaatctggaatctaagtttggtagtaaagccaagaaaggcatttgggtgttggcatctaaaaagaatccttcctatttggaggagtttgagaagaaattggcagagaactaactggaattaatctatatatgggattctttttcgtctatatactaaaatcgggggtgtgcctgtcattgttttatttgttttacaggctgctgttgagtaaagaaacgttctaccgttttaaccggattgcgttgttgggcattctcgtgttttctttgttgcttccgctgattgaagtgaccaaggcgccgcagaatgaaataaatcaggcagtactgacaattgaacaactacttgttatggcagagaatcatcaggaaacccaggtgacaacagtagtggaaggagatgatttggtagatacgtggagaagcccagtgcattggatagaaatagttcttctattttatatagcgggcatatttttccttgtttgccggaatgtctattctttattccgtcttgttcggttaatgaatacggcgcaacggagacagatagataaacatactgttttgttggttcatgaccggaatgtggcacccttcagttggatgaagtttgttgtgatttcacgaactgatttggaggagaacggacgtgaaatactgattcacgaatgtgcgcatatcagaaagcaccattcttgggacttgctcatagcagatatctgtatattctttcagtggtttaatcctggagcgtggttattgaaacaggaattgcagaatatccatgaatacgaagccgacgaagcggtcattaatgagggtataaacgctagagattatcaattattattaataaaaaaagccgttggcacaaggctctactctatggccaacagctttaatcacagtaaacttaagaaacgtatcactatgatgttaaaagaaaaatcaaatccttgggcgcgtttgaaatacttatatgtacttccgttggctgctattgcagtaaccgcttttgcccgtcccgaaatctctgaaaaggctgacgagatttctgccgtcaaagttaatgatttggctgcaattgtagaagcaaaagtggaagaaatcaccaaagatgtgctgaaagactccctgaaagctaagccctatgtagtgcctgagaaatcaaaaatgtatggaggacgttgggtttctaaggattcatcgattgtatattcagcagattcagttgtaatattcaatgattccgttgcttccaagcgaagttcggttgttttatatggtggccgttttgaacggatatcggaatcaaataagcctcttatattggtagatggtaaggaagtatctaaagatacattgtattcgataatgaatgatgaagccaacccgaatcgaataaagactgtgtctatattacgtagcgatgcggctctttctatctatggcgagaaaggaaaacatggtgtttatgatattgaattactgccgaatgcggataaccactttcgaattactaaaactcaggctaaatttaagactaaaaccggatcatttcctaaactgaactctgtccctggcattggcggacttcccattcgtggtgtatatgatggtgaggaaccactagtagtgattgacggtaaagaagttttggaacctaatgctttgtctaagatttctccggatcgtataaaaagcttttctgtcttgaaatcagaggctgctttggaggcttatggtgagaaggcgaagaatggagtgattttgatagacttgctttctgaggaggaatatgaagacattaaaaagaatccgcaacgtccctataacaatgcttgggagatggcaatgaatatccacgataataaagttgttcctacaggaaaggtattattctttattgatggtaaggaagcctcggaagaagaattgaaaaatattccggcaaatgaagtgcgtggagtatcacgtattgataatagcggggagggtgaaactacgatccgtgttgaaacggaaagaaattcggataagtgggtattggcttcgggtattgtaatggataaggaaggaaagcctatggaaggagtcactattactatgtatggaacttcatcgtctacaaagactgatgcaactggacactttgagctgaaaactcctaaagacgcctctctccagatttctcggggtgagaaggtgcttttcaggacaaaagctgcaaaagatataaaaatcgtattggataaataacttaggaatcaatatacttaataaaatggtcattcagcgtccttattatttatactaatccgggttaaaactatatttgtctcctttaaatatcaatgactatgggaatctttcttatctatattttgaaatcggcggtttgtctgtctttattttatctgttttacagattgttgttaagtaaggaaacattccatcggttcaacaggatagccttattagggatattatttttatccctgctgattccctttatagaggtgactactgctcatcagaccgaattgagtcagaccgtactgacagttgagcaactattgatgatggcggaagctatggatcccgcggaggtgtcggttgcacagccggaggaactttccatttcctgggtacaagttctgttgctgttttatctggttggtattatattctttgcatgccgtaatctttactctttatcccgtttactattactgattaaatcgggtaaacgggaaaggcttaaaggaggagtcagactgattgttctggaacgggaggtcgctcctttcagttggatgagatatatcgttatttcccggaaagatttggaagaggatggacgcgagattctgattcatgaaatggcacatattcagaatcgtcattccatcgatttgttggtagctgatatctgtatcttttttcaatggttcaaccccggtatatggctgctgaaacaggaattacagaatattcatgaatatgaagccgatgaaacagttattaatgaaggtattgatgcgaaagattatcagttattattaataaaaaaagccgttggcacaaggctctactctatggccaacagctttaatcacagtaaacttaaaaaacgtatcactatgatgttaaaagaaaaatcgaatccttgggcacgtttgaagtacttgtatgtacttccgttggcaactattgcagtaaccgcttttgcccgtcccgaaatctccgaaagagttgaggagatttctgcagtcaaagttaatgatttggctgcaattgtagaagcaaaagtggaagaaatcaccaaagatgtgtcgaatattacttctggagattcactgaaaaagttggtagtcacgggtgattcaatattgaaggagaagggaacaatatctatttatggagaaaaaggaaagaatggggtgttggctactaaactactgccggatgaagataatcattttaaaataaccaaaacttaagcaaaaataaagccgggaatgaatacatctgtagataaatcgaaacttatgggtacccatattggggggatatctacggtggatttgcgagataaagatgtattggtgatcattgatggtaaagaatcttctcgtactgtggtagatgctttagatccaagtcgtattgaaagtatttctatattagatggaaaagaggctacagatatttatggagataaagcgaaaaacggggctatggttattcagttacattcaaccgcagaacaaatattgcagaataagtacaagattgatgctatttcaaaaacgagattagatgctctcaatcgtggaagtaagaattggggtgtaacgtttcattcagtaagtggtaagaagccgttagtttatatagatggcaaagaagccgttggcgaagaagctttatccagtgtctctccggaacgtattaaaagtatatctgtaatgaaagacaaagcagctgtagaggtttatggagagagggggaaagatggagtagttttagttgatttgttgacggaagaagaatatcagaataaacaaaaatttccaaaacctgcaaaggtaaggactgagagcgaatcacctaaaaaatcacacttttatatggggggatctcatgatgaggaatggcatgttgctcaagctaaaaaaaagcctttggttattattgacggtaaagaagcattggaagaagatgctatctccaaacttgctcctgatcgtatcaaaaactttactatattgaaagataaatcagctacggatatttatggggaaagagggaaaaatggggtgctgattatcactttgtttacagatgcggaatatgagtttaataaagctaatccgaaaaagccttatgcagatgctttggaattggcagaaagcatggcaaaagatgtagaaggagaaattatttattgtatagacgatgaaaagattaagaagtctaaattgaaaggtatgtctaccaaaaatataagatcggtgtctgtaaatgaaatggatggaacaaagattgtaagattggaaaccgataaatatcgttctgattggatttctgtaactggagttgtgactgatgaagaaggaaaaacgattgcggctactgtgttagtaaagggaacaaatgattatactgtagctgatgcagatggtcgttttaaattgaaagcgcctaaaaatgggatacttcggattgctgatgtcaataagtctgttgctgaagtgaaagtaaaacctatgcttaaagtagttttgaaagataaatgagaggatactttatttgattaaaaatgggcagttatatcctgttgaaataaaaatatggaataaaagcgatatacactattattaactatttgttaaacttaaaattttattattatgaaaagacaattttgtaagattttactagctgtttcatttctttttcttgtacctgcactttgtatgagtcaaaacttaaaaggaatctggaaacttgttcagagtgaaggctcttcgcaagtggtcagatataaggtacttgataaagatggcaattatttcaatgtggatgcgtatatcaaagatgctgtagacgtgagttcaggcagccgcagttcggacgatgtattttgcccgtacaaaattacccgttcgggggagtacagcatcattgcaaaaggcctttactgcgagaaactgcgtaatgaacatggcagatcggcaaatgctatcgttcctatatcttaccggattgacggaaagaaagacactgtccaaaattttgtgtaaatgga

SEQ ID NO: 4713 - DNA, 1345 bp, Unknown
  gut microbiota DNA sequence
ttgtaagtttcttcttatatctggattctgttttcaaaaataagcataaattgattcataatcaatccccagttatgaataggctgtgtccatttcttctcaatctccataagtgaaagatagacggtctttttgacggcatcatccgaagggaatgaaagctttgattttgtatacttcctgattttcccgttcaggttttcaatgagatttgtggtatagattatttttctgatttccagcgggaactggaagaaaacagtcaggtcatcccagttgtttctccatgaaagtatggcataaggatactttcctccccatttcttttccaaattgtcaagttccgctgctgcaacctctttgttgggtgcattatagatatttttcatatccgccgtaaactcttttttatccttataaacgacatatttacaggagtttctgatttgatgtaccacacagatttgagtggatgattgtgggaatacggtacggatggtatccgtaaatccattcagattgtcggtgcaggtaatcaatatatcctgtactccacgtgcctttaaatcagtcaggacacccatccagaaagaagaactttccgatttgcctacccacatgccaagaacttcctttaggccgttctgtttcagtcctacacaaagataaacggtcttgtttatgatcttgccgttatcccgtaccttgaagacgataccgtccatccagactataagataaacaggatccaaagggcggttctgccattcctgagcagcctggttaaccttgtttgtaataatggaaatggctgacgtagagagttctatttcataaatctcacgcatttcttcttctatatcagaaacactcatccctttggcatatagggagataacaagcttttctatcgagagtccacggctttcatgcttgggcactgctatcggctcaaactggccattgcggtcacggggaatagaaatgacagcttctccatgttcggtttggattttctttggataattgccattgcgtgaattaccactgttattaccggctacagaattcttttcatagcccaaatgagcatccatttcaccttcaagcatcttttccaatacctgggcatgcaactgcttcaggaacttgcttacatcggcttctgtcttgaactggctaaggaattccttgcttaacacttcatcgggcactacttgattcttttctttcataattttcttcattttgcaaatgtataaaataaaaaatacgagactcaaacttgaatcccgtatttccatttacacaaaatattttatagtgccgaaagaaaatgacgctt

SEQ ID NO: 4714 - DNA, 21124 bp, Unknown
  gut microbiota DNA sequence
gaagtttatcagaaggtatccaaactgggtaaatgagtcagattttgtagacggaggtactcaagtatctccgtttcttgttccggatggaaccagcgtatttcttcatcccttttgaaccatgtcatctgtttgcgtgaataaatgcgtgaattttgcttgatcttttcgatagcgaaagggagttcccattctccgtccagatatttgaacagttctttgtaacctacggtattaagagagtttagatgccggtaggagagtacggaacgtacttcgtccagtaatccttcctccatcatttggtctacacgacgattaatgcggtcatacagttcttctctgtcacgggttaatccgatcttaagaatgcggaaagggcgttcctttttctgttgggtgcggaaagatgtatatgtctttccggtcatgtaacagatttccaatgcatgaatcacccgttttgggtttttcaggtctacgatgcgatagtagtccggatctaataaacggagctctgcacaaagttgctccaatccttcttcctcatacttttgcagcatcacctgacgtgtttcagcatcaacggtagggatgtcgtcaatccccttgcagatggcatctacatacatcattgatccaccagtaagtactactacctcatgttctgtgaataattgatggaggatttccatcgcttcctgctcatattgagcggcgctgtaataatcggtaagatgaagagtgcctaccagatagtgaggcacacgttttaattgatccggggtaggagccgccgttcctatttttaattcagcataaagttgtctcgaatcagcggagacaatgctggtgtgaaagttctccgccagtcgcaggcttaattctgtttttcctactcctgtaggtccgattaaaacaatgagagtgggcatggattttaaagtattaagtattaggtgttaagtattaaagtgtcggggataaaaatattaggtattaactgcttgtcactgcatagcaattaatacctaatacttgatacttaatacttaaaacttctcttcttcataagagccacccgcgttaccacctatgtcgaagccttcctgatcaaaatcttccatatcaaagtcctgatcaccatagaaattttcgtccaggtcgagtgaaccgcttgcagcagccatttcttcaaaatctacagtttgtggcggagcatcacccgatttcttggtacatttggcaccattcatatcttttccggtgatgatttcagacaattcgatgaagaagcaacgctctgtcatgtagtcgaatacatacaacaatttttgcttttcatcttctaccagttcgctgatagtagtctctttcattacccaactatccatttccggattgtcgtccatttcttccaaagtgacttctttttctttttcccaatcatcatcacagataaagaaggaggtcatctggtcgtttgtgtaccctactgatttcagtattgcttcatggaagtcaagaaatgtagcttccggatcaatttgtatttctctgacaaaatcgtcaacttcatcagatatgatagtaaatctgtatatcataatatgactattttgaactgtttatttaataataccacgttctgaattacggatgaaattgatgatgtagtcaatctccggactcttctcaacttcatcttcaattttcttcaatgcatctgtcgtattcaagccgctttggtaaatgatacggtaagcgttatgaatactttcgatcacttcattggcaaaaccacggcgacgaaggccgataatgttgataccgctgaaagctatgggctcacgtcctgcaatgatataaggagggatatctttactgaagcggcatccgccctgaatcattacatggctgcctacatggcagaactgatgcatcaatacattggcactgataatagcattgtcgtcaataacgatttcacctgccatcttggtagagttgccgatgatacatccgttaccgatcagtgcatcgtgtgctacatgcaccccttccattaataagttgttgcttcctacaatggtacgccctttagctgccgtaccacggttgactgtaacattctcacgaatcagattattgtctccgatctcagcagttgattcttctccacgaaacttgaggtcctgtggaactgctccgataacagcacccggaaagatcgtatttccattaccaatgcgtgaaccatacaagatgttcacattagccataatcttgttgttatcgccaataactacgtttttatcaataaatacaaaaggcgcaatttctacattttctccgattttagcttcgggatgaatatacgctagaggacttaccatgtttttggttttatttattttttactatttgtgccatgaattctgcttcgcaaacgactttttcgccaacgaatgcataacctttcattgtggagatgccacgacggatcggggctaataattctacacggaaaagcagtgtatctcccggtactactttctggcggaactttacgccatctatcttcatgaaataggtagaataacgttccggttcgtcaacagaattaagaacgagcaaaccgcctacctgagccattgcttctatttgaagtacgcccggcatcactggttcctgtgggaaatgtccctggaagaaaggttcgtttgctgtgatatttttgatacctacgatatagctggcacccatctcaattaccttgtctaccaattggaaaggataacggtgtggtaatagctcacggatacgatttacgtccatcaccggttcgcggttacagtcgtatgtcggtgcctgtatttcatgcaggcgaatttctttccgcatctgacgcgcaaacttattgttgatggtgtgaccggggcgggtagcaatgatgcgacctttaatcggtttaccaatcaatgcaagatcaccgataacgtccagcagtttgtgacgggcacactcattcggccaaaccagtggtttgtgattgatgtaccccaactgatccgcatccatgtgaggaacacccattacatcagccagtttgtcatagctttcctgtgacattttgcgttcgtaaataacgattgcgttgtcgaggtcaccacctttgatgaggccggcggagagaagcggctctatttcacgaacaaagacgaaagtacggctggcagccacttcgtctttgaaattgtgcatatcctcaagtgttgcaaactgattcgggataatggttgaatcgtaggaaacgagtacattcagactaaaattctcgtccggtagcacgatgatagaagaaccagttgattcgtcccggaattcaattttagatttgatgatataaaaatccttgacagcactttgttcttctgttcctacacgttctatttcttgtacataatattgtgcactaccgtccaaaatcggaaattccggaccattaacctggataaggcagttatcaatgcccaatgcataaagggctgccataccatgctctacagtacttactttgactccattctttgacaatactgtgccacgggttgtttccgtcacattgtcggctactgcatcgatagttggttgtccttccaggtcaatacgctggattttatatccatgattgtccggggcaggattaaaagttacagtgagatcaagtccagtgtgaagacctttcccgctcagtgaaaagctatctttcagcgttttttgtttcagcattggttacttatttacttatttaatagttgttttaattcttctacttctttacgcagattgcgtatttctttttgcatatccggcaaattcttagtcacaacagcagccttgaagtaagctttcggttccataggaggagtcccgatcagtacgctgtctgctttgatgctgcttggtatacctgattgtgctcccagatttacccggtcgccgattgtgatatgtccggcaatacctacctgaccgccaaacatacaccattctccgattttggcagagcctgctatgccgacttgagccgccataactgtgtgtgagccaatttcatcgttgtgcgcaatctgcacaagattatcaattttagcgccactatgtatgatggtagctcccattgtagcacggtctacacaggtattggcacctatatctactttgtcttccaggatcacaattccgatttgtggaatcttatcgtatccgttcggggtgggagcgaaaccgaatccatcggctccgatcactgcacctgagtgaaggatacattcattaccgatacggcagtcatgataaacatttacgtttgagtaaagaagacaaccgttgcctatcttcacaccgtctccaacgaaagtatgcgggtaaatttgagtattatctccgataacggcgttttcgccgatataggcaaaggcaccgatgtatacgttctcgccaattttggcgctgggggcaatataagccagtgaatcgataccttgcttctttggtttactcatttcatagaggttaagcagcttcgccaggctttcataagcattgtctactttgatcagagtagcccgaatctcatgttcagggacaaaatctttattaactaatacaatgcttgattgtgtctcgtagatataaggcgtatatttagggttcgacaggaaagaaatagctccgggcattccctcttctattttagcgaatgtgtgtaccgttgcgttttcatctccaatgatttccccttggataaatgctgcaatttgcttagccgagaactccatgtctttattttaaattaaattagttcacaaataacggatttttttttcagatttccgtgttattgaatgaatattttatacttatctatgcaatcgctggtagcagagatagtatttctttacctttttggacaataatgagatgtttagcatgtccgatgcttcggcaatatttttgatagtgccgtctttgtagataatatcaatactgtcatctgccgggtcgtacatattcttttcgatgctgggggtagagacaaaatagttcgcttcggaaagggttatgcctagttgctggctgatttgcaaagttaactcttttattctgtcctcaccaataggctcggcagaattttccactttaaagatatttcggttaatcatgcccagactaagtgtggaaagaactttatccggatggttgctccatactttcaaggcagtccagatatcattgtcatccaattggatgaaattttccagacaatcgggattgttatggaactccgtatgattaatgtcattatatagaaagaaatgtaaggccggcgaagcaaacagttctactccctgtgatgctagttctttggcacgaagcaacgtgctgataagcattcgttcataggctaccgatgtcttgtgcaaatatacctgccaatacatgaggcgacgtgctgtcaggaaattttcgatagagtagatacctttggattcaattacgagacggtcgtcggccacatcaagcatcttgatgatgcgggcagaaccgatattcccttctgtaacaccggtatagaaactgtcacgacgaagataatcgaggcggtccatatccaattgaccactgacgagctgatgcagaaaccgtttcggatattcgtccttaaagatctgtatggcaagactaagttgcccgttcatttctttattcattcgttccatcagcataagggagatttcttcgtgagaaactccttgtacaatcgtatcttcaagcacatgcgaaaaaggaccatgtccgatgtcatgcagtaagatagccgcttgtacggcttcagcttcgctgtcaaatataaagttacctttggaggtcagttgggtgatagcttcgctcatcagatagaacgcacctagtgagtgctggaaacgagtatgttgtgcgccggggtatactactgacgagagtcctacttgcttgatgcgggtaagacgctgcaaaaggggatgccgtacaatatcgtacagtaacccctttgggatattaatgaatccgaataccggatcgttgattatctttctttcgtaaggcattccttctctttaaagaatcgctttcagttgctctgccatttgcacctgtacttcttgggcggcaagccttgcagcttcggcaaacttttctgttttatcaacgtagatgattccacgggaagagttaacaatcaggccacaggtactgttcattccatatttgcaaacttcttcgagcgaaccgccttgcgctccgacaccgggaacgagcaggaagtggttgggaacaatcttacgaatatcttcaaaagcacgtccttgagtagcgccgactacgtacatcatacgttcgtcatttgcccattcctgcgatttgcgtagtactttttcgaaaagacgttcgccgtttgcatcttctgtcaactggaagtcgtgggaacctttattagaagtcagtgccagtaagatcacccatttgccttcgtaagtaaggaacggagttacgctgtcttcacccatataaggagctacagtgacggaatctatctccagctcttcgaagaaagtacgggcatacatggcagaagtgtttccgatgtcgccacgtttggcgtcggcaataataaactggtcgggatagttttccttgatgtattttactgttttctcaaatgcgatccagcccttcacgcccatactttcgtaaaaagcgagattaggtttgtaagcgatacacagatcggctgttgcgtcgataatcgctttgttgaatgcgaagatcggatcttcttctttcaacaggtgttcgggaatcttcttgatgtcggtatcaagccctacgcaaaggaatgatttcttgcgttttatgttttcaaatagctgttgtttattcatgtctatactataatttttagagttcactttctttcaggcgttccgcattttctgccacgatcaggtgatcgatacaatcttgaatatctccgtccataaaagcggcaagattatagatggtatagttgatacgatgatcggtgatacgtccttgagggtagttgtatgtccggattttagccgatcggtcgccggtagataccattgtcttacgtttggaagctatgtcgtctatgtacttctgatgttccttgtcgtagataaaggtacggagtcgtgccagggcgcgttccttgttcttcggttggtcacgggtttctgtacattcaatcaggatttcttctgcaacgcctgtattcgggttcttccagatataacgcaagcgtacaccggattctaccttattaacgttctgtccgcctgcaccgccacttcggaaggtatcccatttgatttctccttcattgatgactacgtcaaattcttcggcttcggggagtacggccaccgaagcggcggaagtatgcacacgtccttgtgtctctgtggcaggaacacgttgtacgcggtgtacacccgattcatatttcaatattccgtagacattatctcctgtgacgctgcaaacaatttctttgtatcctccggctgttccttcatttgcattggatacttccattttccagcctttggtttcacagaacttggcatacatacggaaaaggtcgccggcaaagattgcggcttcgtctcctcctgcaccaccacggatttcgaggatggcgttcttgctgtcttgcggatcggcaggaacgagcattagtttgatttcttcttctaatgccggaagacgttcctgactgttgtccatctcctcttttgccatttcacgcatgtcagcgtccgactcattcgaaaggatgtttttggcttcctcgatgttgcctaacagttggatatattctttgcgggctttcatcaagtcatccagatccttgtattctttggtcagtttgacataacgtttctggtcggcaattactgccggatcggtgatgagggtagatatttcttcaaaacgggctacaagtccgtctagtttttctaatatggtactgttatctgccattctttaatatctgaattctccgaactcgcttttaatgattaattcagtctggtcacacgcttcgatacgtcctactatctgtgcaggaatgccgaatgattcggaaatagcgatcacttcttctgcatgttccggtgacaggtaaacttcaagacggtgtcccatattgaataccttgtacatttccgcccagtctgtaccgctttgttcctgaatagtcttgaacagaggaggaacagggaaaagattgtcttttactacacggacattttctacgaaatgcagcactttggtttgcgcaccaccggagcaatgaaccataccgtggatttccggacgtaaggtgtcaagtagctttttcactaccggagcataggtgcgggtaggagagagtaccagtttacctgcgtcaattggagaatcctctacagtatctgtcagttttaatcctccggagtaaaccagttcttcaggtacggcggcatcatagctttccggatatttctctgcgaggtatttgccgaaaacgtcgtggcgggcacttgtcagaccgttgctgcccatacctccgttatattctttttcataggtagcctgtccgtaagaagcaaggcctacaatgacatctcccggacggatattggcattgttaataacgtccgagcgtttcatgcggcaggttacggtagagtctacgataatagtacgaaccaagtcgccgacatcagcagtctcgccaccggtagcatatacgcctacacccatttcacggagttcagccagcaattcgtctgttccgttgatgatagcggagattacttcgccgggaatcaacagtttattgcgtccgatagttgaagaaacgaggatattgtctacagcgcctacacaaagaaggtcgtcgatattcataatcaatgcgtcctgtgcaatacctttccacacagacaaatcgcctgtttctttccagtacatataagcaagggaagatttggttccggcgccgtcggcgtgcatgatgttgcaatattccgggtccccacccagtatatcgggaataattttgcagaatgcttttgggaaaattcctttgtcgatgttcttgatggcgttgtgcacatcttcttttgatgcgcttacgccccgcatcatgtatcgttgattactcatgagttaaagaattattttttgtatacggctgcaaaagtactgcttttttttcgtacagccaactatttgtttatcaagcttcgtccggaagaagaataaaacataaaagtgttaattaatggttcgtattattttaatcattatgctgattgatagtggaaagagactagttaaaccgttaaagagacaggagcaaaagttcctttttaacgctcttttatggaagtcctttcgtggtggttaagagctggaatcgccgttatctgaataaatcaggtaacggcgattccgattttagcttggaagttctttaagaaatcatcctttagaactctactttcggagctttttcgcttccttcttccgcttcaaagtatgctttcttatcgaatccgaacatccctgcaaatatattcttcgggaaacggcggatattggtgttgtacgattgtgccgcatcattgaagtttttacgggctacattgatacggttttcggtaccttccagctgtgcctgtaattcaaggaaattctgattggctttcaagtcaggataattctctgtgatagccaataatttgccaagtgcagacgttacagcaccctgtgctttttgatattctgccagcttttccggagtcagaccttcggcatccactttgatctgtgtggctttgctacgtgcttctaccactccttccaatgtctctttttcatgagaagcatatccctttacggtgtttacaagattgggtatcaggtctgcgcgacgttggtattgggtttctacattggcccattgtccgctaacattctcatccatggtgacaagaccgttatatacactgactgcccatatgacaaggatagccacaacggctaaaatgatgataattgactttttcatgtttcttactttttgatgagtatttgattatttaatattatctgtagggatcagaatcgtgaaccggctccaccgccgcctcccattcctccaccgaagctgcctccgctaaagcctccgccactgcctccgaatccgccgcctccgaatccgccgatgaacggaccgcctccgccaccccctctgttgtgatagtcgctatcgtagctttgctgacgacgtatgattgtatttccgcagttcttgcaagtataggtgacatcttccgtctttaccccattgacacgtgatacaagtctgcttccggttctttgcagggcatgtttcccgcatttggggcaacggctctgatttcttgcggcaaagaacgctatccctacaccgattacagcgaacaggataacagcgaaaatgaaatccatcgattcattattcgattcagaaagcgattcattttccattgatccgtcaagtcgctggcaagtcgcccggattccggctaccattccttcattccagttgccgtctttcagatatggaatcatgtacttagtctggatacgtttgcatattgcatcgggaagtaccccttccaaaccgtatccggtgtaaaactggatgcagcgttggtcggtgactaacaggataacgagtccgttatcttttcctttcttgcctactccccattgattgagcagctgatggcaaaaatcaaaacactccatatcaccaatcgaaggaactatggcaactaccgtttcaatccccgtctgttgttccagagcgtggagcatagtgtctattgtgtcacaagcagcttgcgaaagtatccctgccggattgcatacatactgcattttattttgcagatgtacttttggcaagttgtctaccgtatataccttttcttgggcttgcagtggaatcagtagaaaagtagcaagtataagcgtcaatattgatttcataacaatcattttacatttgcaaatatagaaactttttctgttatgattccaaaactccttgttataataggtttaatgaatataccgcccgacgaaatcccgtactttgtcggtgtattcctgtttattctctttgtacgagagggcatgggctgctcccggtacgatccagagttctttgggttccggctttgcttcatagagcggataaaccatccatgtggggacatatgtatctttgtctccatgaataaacagcatgggcagctcacatttctctacctgctttagcgaggaagcttctttgaagttccatccgtattttttctcgcataaccagcttgtagtgtacattaacgggaaagcaggcaggtggaaggaagatttgagttcgtgcgaaaattcatcccatacactggtgtagccgcaatcctctacaaaacatttcacataaggttgctgcttttcgccggataccatcattgtggtggcacctcccattgagataccatgtactaccatttgagtactgtctccaaagatttcatttgcaatgttcatccattgcaaaacatcgatcctgtctttccatcccatttggatggctcgtccttcgctctctccctgatgttgcaagtcgggaagcaggatattatatcccagatcacgattatacagatagccgatcatgaacatacggatagcattgtcggtgtatccgtgaacgattaccgccgttttactggttggagcaggtgcggcgatgtaaaaagcgtgtaactgtatgccttgcggattgataatgaatgtatccttcagagcattcacttgtttcaggctatccacccacggacgcaggaaaggatagtttctgtacatatagggatatgaatcggcgtctttagacaatattttggcattcggcgtcaaggagaagttcaacatgtagaaactcccgccgattgtgcaactggtaagtaccagcatgataataataatgctgtagactgctcttttcttcataataaatcccctcaattaaaatatcacgcccatattcttaactctatcagaaaacggctgtcagcacctttatcttatcggtgccatatttcccaagcggcaaatgcctgtaaaagtagcatttccaaaccgtttttcgtaacagcaccttgtgcttctccctttttcatgaaaagagtgacgttcggattatataacaaatcgtaaagcaaatggtttggagtgagcagttcgtaaggaatgttggggcagaaatctactttggggtacattcctaccggagtacagttgacgattacggtgtattcctccatgatttccggagtcagttcttcgtaagtcagcatatcgtcggtcttgtgtgtccgcgatacaaacacgctttcgatacccagattcttgagtccgtgataaacagctttggaagcacctccggtgccgaggatcagtgcttttttgtgctgaggttgtagcagcggctgaatagattgtgtaaaaccgatgatgtcggaattgtagccgaccagttttacttttcctttcggttggcggataatcttaatgacgtttacagcgccaattttagctgtatcccgatcgagttcgttcagaaaaggaatcacttgctctttgtaggggatggtgacattgagcccgcacaagttgggattctcttcaataacttccataaaatcattgatattgggaatctcgaaattcatatattccgcattgatgccttcggacctaaacttttcgttaaagtagccgattgaaaacgaatgtcgcaaggggtagccgattaaaccgtatttttccatgacacgaaaggattaaattaattattcatcattcttcattattttgtcgctgtataaagtgtgcagataccaaatgtcaaccgtcggaaatgaacttcgccgaatccggctttcgatatgactcctttcatgacttccccttggggaaatactttgatagtgtccggcagataatggtaggcactgttgtctttggagaggagtttgccaagcaatgggataactactttcgagtagatggcgaacagttgcttcatggggaagcgatccggagtagtcagttccaagataaccagatgtccgcccggtttcagtacacgacacatttcggagaggcctttgtccaggtcttcaaaattgcggataccgaatgctacggtgatagcgtcaaatctattgtcggcaaaggagagagaagtgcagtcctcccgggcaaaagaaattttgtccgagagtccttccttctttactttttcacgacccacgttcatcatgccttccgaaatatccgttccgatcagttcgtcaggattcagttcgcggcaagcgaggatggcgaagtctcctgttccggtggcaacatccatgatgtgctgtgggcggaagggacggagccaggcaatggctttacggcgccagctgcggtctatacctaaagataaggtatgattcagtttgtcgtaagcatgcgcaatgttatcgaacatacgttccacctgctcggttttcttaccgtcttcgttgtaaggcttgatatgttgttgtgggtaatccatgcttatttgctcaagaaattcataacgttcttttcgatacgttcagcgatgttgctggtatcttctttcacaaatttctcaccggtgatattctcgaacaattcgatgtaacgatcgctgatgctctgtacgatagccggagtcatttcaggaactttctgaccatccttgccttggaaaccattttccatcagccattcacgaacgaattccttagaaagctgcttttgaggttcgcctttttcgaagcgttcctgatagccgtcagagtagaagtaacggcttgaatccggtgtatgaatttcgtccatcagatagatagtaccgttgtgcttgccgaattcgtattttgtatcaacgaggatcagaccgcgttcagcagcgatttcagttccacgtttgaaaagagccagtgtatatttctccagagtctcatattcttcgggagtagcgagtccttgtttcaggatttcttccttagagatatcttcgtcgtgcagtcccatttccgctttcgttgtcggggtgacgatcggttccgggaatttctcgttttcgcgcataccatccggcagtttcacaccgcagatttcgcggacgccgcttttgtaagtacgccatgcgctaccgcacagatagccgcgtacaatcatttctaccggaaagccttcgcacaaaactccgacagtaaccatcgggtccggcgtagccattttccagttcggacagatgtcagtagtggcatcgaggaatttggctgcaatctgattcagcatttggcctttgtaagggataccttcaggtaaaaccacatcgaaagccgagatacggtcggttgctaccatgacgagtttttcgccgttgatgttgtacacatcgcgcacttttccgtggtacacgcttttttgtcccggaaagttgaaatctgtttttgttaatgctttcattgttttattataattacaaattacaagttacaaatcacagaaacgactagttgttgacctgtttcaccggtcgttcgccgttgataaccagttgttcattctttcgtttctccctttcggctttcgcctccttgtcgaatttttcgtaagcatctacgatgcgttccaccagtttatggcgtacaatatcttttttgttcaattctacaaagctgattccctttacccctttcaggatgcggagtgcttgcaccagtcccgaagtttgtgaggcggggaggtcaatttgagtcatatctcccgtaacgatcattttggtattcatacccatacgggtgaggaacattttgatttgttgtgcagtggtattctgcgcttcgtccaagattacgactgcgtcattcagtgtacgtccacgcataaatgctaacggagcaatctgaataatgttcaattccatgtattcctttaacttggcagcggggatcatgtcctgcagagcatcatataatggttgcagatacggatcgatcttatctttcatatcgccgggcaggaaaccgagtttttctccggcttctacagcggggcggctgaggataatctttttgatctctttgtttttcagcgcacggacggcgagggctatggcagtatatgtttttcccgaaccggcggggccgatggcgaataccatatcgtttttggcaaagccttccaccagtttcagctggttctcgcttcgtgggataatgggcttgccggtaacgctgaaaacaattacgtttccggtctgttccgcttgcggagcattcccttttataatgtcgatgatgacttcctctttcagcgaattatattcggcacagtatttttcgagtttggtgatattttcttcgaaggcacacatttcctcctcatcgcccagcactttgatgacattgccgcgggcaacgatgcgtagcttcggatataaagctttaattaactgtatattggcgttgtttacgccgtaaaaaataaccgggtcaatatcctcaagaacaatcagtttctctatcattgaatcgtattaaagaaaaatttctgcaaatttagtgaaacgttttggattcttcggctgtttacgggtgaattttattgcaatttatactcatcgtgcagtgatgtggaaacatccctgttttaattcatattttatgtagcatttatcggcttggcgcaagtctctcaacacttcagacagaacgagcttcaaggtatcggcattgacatcctgcagaggacgtccgtcttcgtcttccacctttttgaatcgtttccagctgacgtcaaaggttgcgccatagcaatgggcggagtttgcggaagcgtttccattccgacggcggagacgcttcacgtcactctgcgaacgtagtacggaagtgacgataatctgatttgggttcaacccttttgctgtcagtgaatcaagaaaattggagccgatggtgtcgagcaattcgctggcgcgggggaccagataggggatggaatgcgtcagagagtctactgtgtaaaattggttgtcggtgatatggataagctgttctttcatcttttcggcagcgtccctgtcttccggcgggcagatgccgacggcttgggccacggcgagatgtttatcattcaaatccgggaaagaacgtttgtaactgactacaccacggatgttgcggggttcgttcagtttgagagacatatctttctttttgcagccggcagtgagagtgacaagccccgtaatcaatataaataaaggcagaaggtgaagtttatggttattcatttttaatattttgctcgcaaagatataaaaaaatgcctaccttcaaaatgaaggcaggcaatctctatgaaataatttattggttatttcttcttctcttcttttttctcctccggctttccggcaggtttctcttccgttttgctttccggattgatgataccctttaccgtttcgccgataggcagtttatccagtacaccgagacttggggccactgttttcaccagtgaactgaggaaattgcttgtacctccgtttcctccgtcgaatacggtgatattgcctaggttcatgtgttcgaaagccttcacttgttctccggcaatttccttccattggtctaccatcttgtattggatggcgatggcagggttcgattctgctgctctgaccatagcctcgaaaccttctgcttctgcgagcaatgacctcttcttaccttctgcttccgcttccagtttcagttggatagctttggcttccgcttccgcttgtgccaaagtcgctttcgcacgtgcttccgcttcacgggtaatcttttcggcgatggcatttgcctgaaggatagcctcctgtcttgcgatctctgccggaacgatcttttcagctttcagtgaagattctactttcttcgcttttgcttcttccacttctttttgggcgatttcccgggcagtttgtacggcagcttccgattttgcagcggcttcaccggcttgcttgtcggcatttgcctgtgtgacggctaattcggcatttgataaggccacttccttctgtgcgtcattacgtccgatagccgctttcttagcagcttctgcctgtttgatttccatgtcggagttcagttcggcgacacggctttccttttcggtgtttgcctgctcgatgcggatattcttttccgcttccgctttggccacttgcgattctttttctgcgttggcaaaggctacctgagagattctctccttatccgcatttgctacagagatttcctgttgcttcttggtttcggcaatggcgatatcctgatctttgcgggtttccgcaaccttggtttcacgttcctttatctgattggcaattttgatagcacccagcttttcctgttcttcgatgttggcttgtgcttcgttcagagccttgctttcagcttccttacccaggttgacgatgtagttggcagcgtcgcggatatcactgatgttgatgttcatcagatacaaaccgaacttgcgaagttccgtgtcgatgttgtcttttactttagacaagaatttatcacggtcggagttcagctcttcgatagtcatgtctgcaatcaccagacgcatctgaccgtatactacatccgtaatcaggttctgtttgtcatccattgtcagtcccagcatacgttcggcagcattctgcatcacttccgggtctgtgctgatagctacggtgatggtagtgggtacgtccacacggatattttgggcagatagggcacctgtcagtttacagtctatctgcaatggtttcatagaaaggaattcgtagccctgaatgatcggccatacgaaagcggccccaccgtgatataacttggctgatttcttttctccccctgttttaccgtatactacgaggacttcgtcactcttacatttacggtaacgcgacaggatgccgataaaagtaagcagaatgaccgccactagtatagcagccatgattagcatttcttgtgtcataaaattgtgtatttgaatagttatttaatgtataaagttccgtctttgtagctgctgatgattgttttgtctccggtctgatatgcttttccggtttcggagatcacgtccacttcgcgcatggcgccgtcccggcttgtctgtactgtatatttgttatcactttgcttgaagtaaatggtacattcccgtcctaccaattgatcggtctcttcagaccggttcacttgctgcagttgataggctttcttataaaggaaccatacggcaaagacaaagaacagacctaccagaattccgattgcataacttgctatatcggcatttcctacgaggtacatataccatccgaatccgatcccgaagtgggtgagacctttgaaagatactacgctgctgatatcagcatccacgtccacatctgcatctatgtctccgaagaaaatggataatacgaattgaataagaaaaattcctgtagtgacgagggcgatgattaggaagatggtatgactcatagtaattctgtattaatataaatgtatcagttataatactccaaatatacaggtttataagagataaacaaagataatgtgataaaaagtagatatgtttcgaaaagttttcattttcagattgcctctgttcaattacctgtgttatcaatatacaattactcttgtataattttgggaccaatccggactattgtaaccgtatacgaggaaaggattattaggcttcatggctattacatgttttacgttatacattttatgtaatacaaagaacacaataaataatcagatatgcaaagaatcactcacataagatattcatttcttgatctcccaaaagccattacgacgtccgtttttgcgttctataatgcctctttcacttaagtttacggtcatggatttgacagttctctcagattttcctatgtgttgtgctatttctttttgtgttgcatttggtttttctttgaggtagttaagtacggctatctcttccaaagtgcagtctaaagtgcaatttttgcactttgggatatccatatcagtctgttttgcactttgaatggcttccttttcgatttcgtcgatctgtagatttcgatttttaagttcattttgttcgttgagaatcaggtttctgaagaatttttctaaaaattcggtcgtggcatacacacctttggttaggtcattatagttagctctgacgagagcattgcggaagtaccaagaatggttggcgaaggtctcgttactgaaattgaatccaaaagtatgcagatatttgatcgtgaatacggctgttgtgcgtgtatttccttcaccaaaggcgtgtatttgccatattccagaaacgaatcgggcaatatgtctgatggcctcatctatattcagatttttataatcaaaaatcttttcttgagagaaatcatattccaaggtttcgcggatacttcctgcactggcataaagtactgttgctcctttcagtacccattcattctttgtaatattgtaatcccgtatttgtccggcatggctgaatatgccttcaaataaatgccgatgaatagccaagtattcgataggtgagaatgtgaatgtattctccgaaaggatctctgttattctggctgaaaccttatcggcttcttccgtacgatcttcgctagatgaacgggcaacctttgatttgtaataactatcaactaattgtttgacctcgtcaatagtgatatccccttcaatgtgttggcgggctttttccttcaaatattccgaaggtttaagaccatcaacagcttgcaggccaatggctgtttgccaagcgtatcctttctcccgcttatgcggttcgctctgtcttatgtattcctcgaagtcgttcatcttttacgttatacattttatgtaatacaaagaacgcaataaataatcagatatgcaaatcatgtgaactcctgcgaatcataacttatgcttccggtgaattgttgttcacaaacaaaacaagctttgtaaatatagctatcatttttgcttcattgacatgaagctatcactttgacaagttaaaaaggcttctacgggttggaagcctttcttatgggcaatgcaatctgaagacatttcgcgaattataacttatgtttccatgttttcctgtcaaaatcaccaaatcgtgaaacttatttttcgtcccatatgataaaggcttcgcatcctcgctcgaattcatctctttcgggggttcctatagcaccaaaatcttcggtgatcaaatcttctataggagtacatccattaatcttcattttttcatttgtcatcatcatttgttctcctttcattatctttttgcacaaaaaatccccccccactcagcgctactttcacaagctgcttctgagtggattgaggaacacaaacaaaacaaacaatatattgtgtaatttcttactatgagttatgaagcttatactcttctacagtttttaggctgcagggcaatcaagtacaagcagtgaatcttcgcacagcgtgatggaacacttttccaatatactgaggtcgatttcaacttttatccgaccgcagacatcttgcactttgtgtttgaagtctacaaagcccttcacaaatttctcgattcggttggctgaatgctcgtaagcataccagcgtccgttctcttcaaacagataggcttgtctcatatctgatgattctagttgcaggatgtctttttgtgtcataatatctaagaattttaagttttatttactgtattattttac

SEQ ID NO: 4715 - DNA, 298 bp, Unknown
  gut microbiota DNA sequence
aagccgatgaaactttagttccaagcatgagaaacaaaagtttcaagcgggagaaactaaaaagctctgtatagcccaaccaacagcccataagtaaccattgaaaacaaggcagtgtgacagcaaaatttgccgtcacactgccatcacctacttctgtcacctcattaattattcatattcaatcaattacacccgacaacgtgacagatgacagcaaattatagttttttattttcatagagagcctggctgacacgtaagtaggggttgactaaaaagtccccctaagaatgtt

SEQ ID NO: 4716 - DNA, 1352 bp, Unknown
  gut microbiota DNA sequence
ggagcagtgacttcggattcagatgaaagtttgctgaagaatgcagttgaaactgattattctttggattttgaaggtgaaaaggttgttttacttacgttgcagaatggaggtatgttgcaatatttaggagaaaatcaggaaaacacatttgtcattacgggatattctgattctcagattactgcaacgggacaagcgaatggtaaaacgatgattctgaattcggtaactactgcggagctgcaacaagccaaggagagaaaacggttggctattattgcttacaataaagctcaatccatggaaatacttaagacgaatttgagtaatggattacttcgtaatgcgtcaaccaatcagtttgcagcacattatgcgatgtcttgtgatgaaaatgacaattggaagattaaaatctcattgctggatggcaaaatattgaagcatacagaatatgctatgacaattaatactaccaatgatgagaaagctacattaagtattgatggtttgactgtgaatggtgtggctgttggagcactttattataaatatgatacaggagatttgagcacggataatccagcctttaaggtggacttgaataaaagctctgatatgctgaaaacatatacaagttcttggaaaacacatattgtcgatagaaataatatttgtgataaattgactggattgcttacgcaaatagagtttgacgaccgctctccaaggaatattatagtttgcccgggtgagacaggtgctggtaaatggcattatgtaggttttgtgataaatgctacagccaatgatgcaaccggttgtgtttatcttgaaaatacgggaattaattatattcttggaagttatggtgatgatgcaggagttgtacgatcaatcccgatctatagtgctttcttggatttctgtttttcggataagggtgtttggatgtatgaagattctgattcatatttttatgtgattagtccggtttctgatgaatggtttagaatgaagatataaagtgaaataactattttttgaatcaagcaagaaagtaagaagtacaacttttctttcttgcttgtgctttctgttctcgacaaatcattttatcatgataattttggctaaagaatacctaactttgcaggcagaaacgacgaaataaatatattcaactaattataatagcttaattcgcaaaccatgaataaaaagaacttattgtctcttggaactgccctattactgggcacttctcttctttttgcccaaaaagaacctgttgactacgtcaatcccttgatgggaaccgactccaaaatctcgttgtccaatggaaa

SEQ ID NO: 4717 - DNA, 451 bp, Unknown
  gut microbiota DNA sequence
gagaatgccaatggtaagcaggaaattattcctttggatctgaataaggcggagactattctttctccttattattatttgcaacagaatgatattatttacgtaactccgaataaggcgaaagctcgaaattcggatatcggaactagtacaagtttatggttctctgctacttcgatccttgtttctattgctagtttgttgtttaatattttgaaataaaaggaagagttatgaaggaagaaaatcaaaacgggaaaggacctgaaatgactgaggagcaaattgatttccgggcattgctttttaaatatattattcactggccctggtttgtaggtgctgtgttgctatgtttggttggtgcgtggttttatctgcactgggctaccccgatctataatatttccgccactgttctgataaaagatgagaagaagggcggaggtgc

SEQ ID NO: 4718 - DNA, 385 bp, Unknown
  gut microbiota DNA sequence
acgtctgccggaacggggctcatacggagtccgttcagtgcgcggtcgagcatgtgggtttgaataccggcttcatggaacggttttgtccattcgcgcacggctgtattcgggttttcaccaaacaataaatttacctgttcaaaacctccgccatttgtttctacgcgggcgaaacaacccatttcaatgatggccggagctacctttacgagttggtctacacgaggtacatattttccggctgattgccacatatctcggaaaaccaagctaaactttacttctcttttcatgtctttcagtgatattctttatagatttataatttttctactttagtgatttttcctttaccctgtgtcaccacattcacagcagcagt

SEQ ID NO: 4719 - DNA, 559 bp, Unknown
  gut microbiota DNA sequence
ttccgttgttttcggcatattgacggatgcggtcccggccgtacaggtagtcggcgttgaagtcgatgttccatttgccgaaagtgccgttgtagtatccgttggctgcctgccaccagccggtgtgggcatctgtttggcggagagcgtgcaggtggtctacttctttgccgtcttgtaggatgagggttgtcccttcattggtagtatgtgcattgcctatgttcgtgccgggcatgtagcgcatgccgaatgattggtcttcgtctatttcgtagttgaatcccagttcgccgttgaaggtgcgataggtttgtttgcttttgtcttctgtcgattggttccagttggatgaagcataaatgtcctggctggaggtgcccgttctgtaattgttgatttccgcaaagtcgccttttacgaaaatatccagtccgccggtacggtagttcagggatatgccttcgttgccgatcggttcgcgtccttgcgagtagtcggtgtagaaactgccgctcattccctgtccgcgtttgcggatggtgcgcagacggatgac

SEQ ID NO: 4720 - DNA, 2923 bp, Unknown
  gut microbiota DNA sequence
ggattatatagaaaagactgataaaattgacaaactgggttcgaaacgtggtgctgccttgtataagttcaatagcaaggcttaccgcaaggacccgaaatttaaattataatcattatgctggaagaactaaaagaaaaagtatttcatgccaatctcgaattggtaaagcatggattagtcatctttacctggggaaatgtttctgccatcgaccgtgaaagcggattggtagtaatcaaacccagtggtgtaagttatgatgatatgaaagccgaagatatggtagtagtggatctggatggcaaggtcgttgaaggacggctgaagccatcttcagacacccctactcatgtagtgctttacaaagcatttccgaaaatcggaggagtggtgcatacgcactctacctatgctacagcctgggcacaagccggatgtgacattccgaatatcggaaccactcatgcagattatttccatgatgccattccctgcacagcggatatgacagaagcggaagtgaaaggtgcttacgagctggaaaccggtaatgtgatagtgaaacgttttgaaggcttgaaccctgtacatacaccgggagtattggtgaagaatcatggtcctttctcttggggaaaagacgcgcatgatgccgtacacaatgctgtggttatggaacaggtagctaaaatggcaagtatcgcttatgcggtaaatcccaatttaacaatgaatccgctgctgatagagaaacatttcagccgcaagcatggtccgaatgcttattacggacagaaataattaaaaattaaagattaaaaattagaacaataacaattaaagcaataacattatgaacgcatttaatcaatatgaagtatggttcgtaacaggagcacagcttttgtacggaggtgacgcagtaatcgcagtagacgcacactctaatgaaatggttaacggattgaacgaatccggtaaacttcctgtaaaggtggtatacaaaggaacagctaattcttctaaagaagtggaagctgttttcaaagcagccaataatgacgaaaagtgtgtcggtgttatcacttggatgcatacgttctctcctgctaaaatgtggattcacggcttgcaacagttgaagaagcctttgttgcacctgcatactcaattcaacaaggaaattccttgggatacaatggacatggatttcatgaacctgaaccagtctgctcacggtgaccgcgaattcggacatatctgcacccgtatgcgtatccgtcgtaaagtagtggtaggttactggaaagaagaagagactttgcataagattgccgtttggatgcgtgtttgtgccggttgggcagattcacaggatatgctgattatccgtttcggcgaccagatgaacaacgtagccgtaaccgatggtgataaagtggaagctgaacaacgtatgggttaccacgtagattactgtccggtaagcgaattgatggaatatcataaggatatcaaaaatgaagaggtagatgcattggtagctacttacttcaaggaatacgatcacgatgcttctctggaagataaatcaactgaagcttaccagaaagtatggaatgctgccaaggctgaactggctatacgtgctattctgaaagccaaaggtgccaaaggatttactaccaacttcgacgatttgggcgacattgaatacaatggtttcgatcaaatcccgggtcttgcttcacaacgtctgatggcggaaggttatggattcggtgctgaaggtgattggaaatcagctgctctttaccgaactgtatgggtaatgaatcagggtcttcctaaaggctgttcattcctggaagattacacactgaacttcgatggtgcaaacagctctatccttcagtcacacatgttggaaatctgtccgcttatcgcagccaacaaacctcgcctggaagtacacttcctcggtataggtatccgcaagagtcagactgcacgtctggtcttcacttcaaaagtaggtacaggctgcactgctactgttgtagatatgggtaaccgtttccgtctgatcgtgaacgacgtagaatgtatcgagccgaaaccgctgcctaagttgccggttgcttctgctctctggattccgatgccaaaccttgaagtaggtgcaggtgcatggattctggctggtggaactcaccactcttgcttctcttacgacctgacagcagaatattgggaagattatgctgaaatcgcaggtatcgaaatggtacatatcaacaaggatactacgatcagctgcttcaagaaagaactgcgcatgaacgaagtttattacatgttgaataaagcactttgctaaaaacaattattcaagtttcgcatggcttaattatttcgttaagtttttgcgaaacttgatttttttataatgatcgttataccttaaaatattgatttcaacatgaaattagatgcaaaatcaaccatcgaggcaggtaaagctattcttggtatagaactcggttctacacgaataaaagctgtcttgatcgaccaggaaaacaagcctattgctcaaggtagccacacttgggaaaaccagttagttgacggactttggacgtatagcattgaagccatctggtcagggctgcaagattgctatgctgatcttcgtactaacgtaaagaatgcatacggcatagagatcgagactctggctgccatcggtgtcagcgctatgatgcatggttatatgccattcaacaaaaaagaagaaatcctcgtgcctttccgcacttggagaaacaccaatacaggccgcgcagcggctgctttgtccgaactatttgtctataatatccctctgcgttggagcatttcccacttgtatcaggct

SEQ ID NO: 4721 - DNA, 1139 bp, Unknown
  gut microbiota DNA sequence
catataaacaccccctcatagctcttaaataaaaagaatgctttagaaatgcagtctgatagttggcaggaataagcattcttattaatccaagagcaggcacgatgcactattgccatagctaaccaataatttactaatgctcctcatttcctttgaaagaatctttagggaaagacataggacagcctaagatacaagcgaagaaattcacttgtgttttaggtttgttcctattaaatccattcaatcaataaccatttaattcaatttcattatgagagatttagtaattatgccagctatggcacagcgtagagaatcattaaacatgggtgagtttgcagaagaagcaatcattgtggaagaagtagcagcacccaagagagtaaaccatttcattgaagccaacacgcaggaagtaaccttacagcacttacagcaagactgcatcattccaagttttgcatcaatggaggaaaccataagccaccaatcctttataggtgcagtagtagatgcagctaaggattactttcatggagaacagtttgatatgccagagattagaatctcacaccctatcaatggcagaataccaagtgcattaggtaagaaagcatctgaattgacagacgaagagaaaactttgttctatcagagaatgtgtttctgttttgaaattccatccattgtacatgatgaatacggtaatcgtttagcattatccattggtggagtgagagcatataacgagattaacttgtacagtaagaagtctgttgagagatttaaaatcttcataggatttagaaatagagtttgcagtaatctcatgctcaccactgacggtttgcaggataagatagaagtcctaagcgtacaggaactatatgcagcagcattgaatctgttccatgcttacaacccatccaaagacctacatttgttaagaacacttgggcagatgtcaatctcaacaagcgagttctgtcaaataataggcaggatgagattatatcaagctcttacacccaaccaacagaaacgcttacctcgtctattattaggagacagtcagattaatgcagcttgtagagcattcatttctgatgtgaactgtcttttcctgatttagc

SEQ ID NO: 4722 - DNA, 726 bp, Unknown
  gut microbiota DNA sequence
cgaacagagaagttaagcctcgtcacgccgatggtactgcgtaacagtgggagagtaggtagccgccgtttttaagaagccccttgattcattttgaatcaaggggctttctgtcatttggtactttgcgaaaaaagtgctatatttgcgaccgacaattattttattaaacgtttaaagcaaatttaaaaggtatgaaaactaaattatttttggctgctgtagcagtaacattttcttttgcaatgatgtcttgtactggtaacaaaactactaacgctgcttctgaaggtgaagaaacaactgtagaaacagtggaagctgttgttgaaactgattcttgctgccaggctaaggactcttgtgctactgcttgcgacaaaaaagctgattgcgcagaaaagaaagaatgttgcgataagaagtaatctattgatttagaacaataaagaaggagagggagagaatggttcaaacattctactccctctttctgttttaataaacatatcgctttattcgtgatacatttttgataataatcggctttaacttatgaaatgatattttttttgataaaaaagtaacgtattatttggtggtaaagaaataatccatacctttgcaccgtcaaactaataaaagagacaagaaatgaatcagatgtttatacatattctactatgcggtattattattctactatcaaaggttagtggaagtgag

SEQ ID NO: 4723 - DNA, 637 bp, Unknown
  gut microbiota DNA sequence
taagcattgtattccaactttactacaagcggtaatatcggaaaattcatctccaacatataccatttctgctgattggatattatattttgacattagttccgccattgattccgcttttgtgtttctatctggcgatccgattgaaatactgtcgaaaagagcttccatttcaaaatggtgaagcgtaatatcacaactcctttgacctttacctgttatcaaagatacaataattgagttctccttcaactctgttatcaattctcttatccccacaaatggttgaatgttgactgtgtgcatttctttgtatatcacataaaaatcaaccagagctttttcccaatcttctgaaacgacctctttaatcattccctcttcattaagtccgaatgttttcacaatatcatcttctgacaacatttttgatgcatagggagatactgcctgcttaaaggcttcgatacacattgggattgtatcggcaattgtaccatccaaatcaaaagcgaccaattttatcatagtttcttagtttgattgatttgacgtatcacttcacatggatttccaacagctaaactatttgccggaatatcttttgtaacaacactacctgctccaattacactac

SEQ ID NO: 4724 - DNA, 1316 bp, Unknown
  gut microbiota DNA sequence
gcttccgatagtgattttattacaatccacaaaggtacaaccggtatttacagtaacattatcccctatatgtatattgcagccataatcacaaataaatggactggcaaccgaaactttcattccgatactacctagcatcttttttagcaagctgtgtttttcttctttctcctcataaggtaatgaattatattttatcaataacttatgtgttcgggtctttaaatccaagaaaacttggttgtgacaatcataccattcaccagccagacatttttccatttctgttttcataattgttacgtttataagattgaaactatttcggttatatcttttctgtttcttgctgaataacgttgttttgatagttctaaaaagttcataagtaatctaattttgatttgtggcaaagttatacctattttgtttcaaatataggtatatgttttcgttatattggtataattctgctttatgtgttatatttgaagtatgaaaaaagaaaatcttcatcaaccatttgagatcagctttaacgagcataatgaatcgttattaactgagcatgagcatactttttttgaactggtctacatcttaacaggaacaggtattcaatggattaacaataatatgttcccatatcatgatggacacttgttcttgataactccaaatgattctcattcctttgagattcatacaactacaaaattcattaacatcaagtttaatgacatctatatacattcagccatatttggttcagagaatatccagagattagaatttattttgcaacatgcaaatcatcaaccgggttgcatccttagaaataaggtggataagttattagtgaaaccaatgattgaagcaattattcgggaatatgtaaataggaatctgtatagtaaagagattatcacgcagttgataaatactataattattgttgtggcaagaaatatagctatgtttttacctcaacaagtcgatgaatgttcagatgataagtttctcgatattcttcaatatatccaagcaaatatctatcaaacaggtaaaattagagcaaaagagatcagtcagcacttcggtatatctgaaagttacttaggacgttatataaaaaagcacactaacgaaacaatgcagcaatacatattaagctataaactgaaattggtcgaaagcagattgttacatagtcaaatgagaataagtgagattgccgaggaactaggatttaccgatgaaagccatttgagtaaattctttaagaaatacaagggatgtagtccttcaagttt

SEQ ID NO: 4725 - DNA, 2229 bp, Unknown
  gut microbiota DNA sequence
acggggttactttttcgggaggagatccgttttataatccggaggctttcctgctttttgtcaaaagggtaaagaaggaaacggggctgaatatctggtgctatacgggatatacgtacgaagagattcaggctaatccgcgcttgaaggctgtactcgactacatagatgtgctggtggacgggcgtttcgaacaggcgctcttttcaccttatctggaatttcggggaagcagcaatcagaggatattgagaataggtaataagtaataggttataggtaataatggtgggggaggttttgtattagtttagtgcggggggagctactacgaactgttgtgggcgtgtctcctgcgctaaaaaaacttatatttcaaagaagattgaaacacgtacttctttgttttgtttacatttacaaacaaaataaggttctactagaataagttttttttatgatacaagccaataataccacttctatagatgaaaccgatggactgccaatgccgagacgtatctgggcagtggtttccatcggattcgcactttgtatgtcggtgctcgacgtgaatattatcaacatcgtactccctacgctttcgcacgatttcggaacttcgcctgctgtaactacgtggattataaatggttatcagttggctatcgttgtttcgctgctgtctttctcttctttgggggagattatcggttatcggaaagtgttcctgtcgggcattgggctgttttgcatcacttcgctgatctgcgccttgtccgattcattctggacgctgacgattgcacgtatctttcagggattcagtgcgtcggccatcacaagtgtgaatacggcgcaactgcgctacgtatacccgaaaagtcagatcgggcggggaatgggaatcaatgcgatggtagtggcgatatcggcggctgccggtccgtcggtggcaagcggcatactttcgatagccagctggcactggctgtttgctatcaatgtaccgctggggattacggcactgctactgggtatcaagcatttgccgagacaggaagagcggtcgaagcggaagtttgacttcgtgagtgcgatagccaatgcggtcacgttcgggttactgatttatacgctggacggattcgcgcatcatgaggagatggatttccttgtgctgcaattgatcatattggccatcgtaggaacgttttacgtacggaggcaactgactcagacgactccgttgctgccgctggacttattgcggataccgattttccggctttcgattctgacgtctatctgttcgtttatcgctcagatggcggccatggtgtctctcccgtttttccttcagaatacgttggggcacagcgaggtcatgacaggattgttgctgactccgtggccgttggctacactggtgacggcaccgttggcaggttatctggtggaacgcattcatccggggatattggggagtatcgggatggcgttgtttgccgtcggacttttttcactttcggggcttactgccgaatcgtccgatatcagtataattcttcgtctgatgctttgcggagccggtttcgggttgtttcagacgcccaataacagtacgattatctcttccgccccaacgaaacgttcgggcggtgcaagtggaatgctgggaatggcacgtttgctggggcagacgttcggtactacgctggtagcgttacttttcagttttgtcgtgcacgaccggagtacggcggtctgccttatggtcggaagtgggtttgctgttgtggcggcgattgtcagcagtctgcggttgtcgcaaccgtctacgctgaaaagagaaacgaatcggtcatgacgaataaaactatctgtcatcgggagcgaaaatcataggagaagaaactaggatcaatccagaaaaccggttgtttccgatttgtttctttcacatattgttatgagctaaatgatagtcggttctatcttcaattctcctccttcgggaaggaggagagttaagttactattgtgtactactgtttagttcattcctttgcactatcgagctaaaaccagcttttcggactaccccaaagaatgttaatgatttaacattcgtctccgggcatccaaagagccaaaaggagaaagggcgtatcatcgttggcagactaaggcatttatcgtatatagaaacggcgctttaacgtagtg

SEQ ID NO: 4726 - DNA, 87197 bp, Unknown
  gut microbiota DNA sequence
ctatattttactgtatttcaacaacatacattgcttcatcgccgacatcctccttttatccgccagcagtccgctgtcgccgggattgctgttctgacaacttccggtctgcacgaggggaggacgggtgtgtgtgtcttgccaatccctgcttagaagaagaacctcaatatgtcattgaagtttgcccagatcagcaagccgaacagaagcaccataccggtcatctgagcgtactccataaacttgtcactcggtttacgacgggctatcatctcgtagaagaggaagagcacgtgtccgccgtccaatgcgggaatcggaagaatgttcatgaaggcaaggatgatggaaaggaaggcggtcatgtaccagaactgatgccagtcccacgtagcagggaaaatgcttccgatagtaccgaagccgcccaactgtttggctccttctttcgagaagagatatttcatgttgccgacgtatcctttcaatgtcttcacacccagagagacgcctgcggggaaagattcaaagaatgtgtattcctttttcaccataggcagcagacgatccgttgtcagactggcaactacgcccatcagataagcggaatccacgcgcagggaagtcgtatcggtcacaccgccacgcacatacgtcagcgtgatcagacgagggtcgatgctgtctttcagaagcgtttcggcgtttttcttgcgttccgccatcgtctgcttgaaatcagagaaggagatggattttccgtccaatgcgatgatactgtcgcccggcagaatgcctgcctgcgcagcgggagaattaaccatcacgctgtcaatcacatacgggaaacggaaagaagcaaaacgaacgctgtccgccatcaggcgctgcatcatgtcttcgggaatgtagacggaggctttcttgccgtcacgaagcactgatacctcacgggcatcggctatctgactcagcatatcgccgtcataacgtacgaaaggcacattgtcggcagacaaaaggatgtcgccatcctgaaaaccgaccgctttcgccgtttcgttgaagtccataccgaggggaacttcttgtacctttatatactggtcgccccaagcgaaaagaatcattgaataaataaagagcgccaacaggaagttgaacagcacaccgcccaccatgatcagaagacgttgccaagccggcttggaacggaactcccaaggctgctcaggctgtttcatctgttcggtgtccatcgactcgtctatcattccggctatcttgacgtaaccgcccagcggcagccatcctactgcatactccgtatcacttctcttgggtttgaacttgaacaaggtaaaccacgggtcaaagaacaagcagaatttttctacacgcaccttgaacaaccgggcaaaaaggaaatgcccgccttcatgaataataacgagcaaggataagctcattatcagttgcagggcacgaattaaaaatgtttccatatagtctatttacaatttaaagcctcatccaaaccctctgctcataagaggaaaaccgaggcgctttctaatttatattacttatttatatttttcattgttcacgaaatcagctccggtgctatcacggaatcaattccgcagctattctccgcgcttcggcgtcggtagccacatagtcgtcgtaagtaggagcggctacaaacgcagcgcgttccatcgtcttttcgatcacgtcgctcatgccgaggaagctgatgccgtcccggaggaaagcggctaccactacttcgttggcggcattgacgatgcaaggcatatttccgccccgatacatcgcctcgtaagccagggcaaggttgcggaaacgtttcgtatccggttgctcgaacgtcaggttcgtgcactgggtgaagtcgagcctgtcgaaagaagagcagatacggtcgggatacgagaacgcatactggatgggcagacgcatatccggcatgcctaactgtgccttgacggcaccgtcctcaaactgcaccatggaatgaatgaccgactgcggatgcaccaccacctcgatctggctgggctgcacgccgaacagccatttcgcttcgatgacctcaaagcctttgttcatcatggatgcggagtcaatggtgatcttggctcccatctcccagttgggatgtttcaatgcctgtgtcttggtgacggacttcagctgctccagcgtgcaggtccgaaacggaccgccggaagcggtcagtatcaccttctcaatcgggttcccgacttctccagctaaacactggaagactgccgagtgttcagagtccaccggcaaaatgggagtgcggtattgctgtgccagctggttgatcagctctcccgccaccacaagcgtctctttattggcaagcgcaatggctttcttggcacggatggcgttgatcgtcggcttcagtccggcatagcccaccattgccgtcagcaccatatccaccggtccggcctccacgatctggcagaccgcgtcgattccggcatatactttgatcggaaggtcgctcagcgcttccttcagttgggcgtacttttcttcgttggctatcaccaccacttccggctggaacttgcgtgcctgtgcaatcagcagttctacccggttgttggccgtcagggcataggcttcgtagaggtcggggtgttcttcgatcacctgcaacgcctgcgtcccgatagagcccgtagagcctaaaatagctatttgtttcttcttattcttcttttctgaatccattattatctaattcctctgtcacttgtcacttataatcgtatatcccacttctcgtcattggctttaaaacacgatgtacttctccggattgacaggatgtcccttgtaccacagttcgaagtggagatgcggccctgtgctgagcgttccgctgtttcccaccagtgcgatggcttcgcctcctttcacgcggtcgccttcttttttcagcagcgagccgcagtgcttgtagatcgagacgaaatcctgactgtgctgtacgcctatcacgtaaccggtttcagcggtgtaggtgctcagaaagacggtgccgtccatagttgccagcacactttcgttggggttggcggcaatatccgttccaaagtgtttcttatcggtgttgaaatggtcggaaaccattccacgggtcggacgatacaggatcagtccgttgacatccggctgcgaaacgatcgtagtcagattatatttttcattttcttcgtattggcggcgaaattcctcttcacgtctggtacgttccatcagggtgtcttcgcgggcggcggtcagcgagtcgagcgtctgcacgctgtctatgggcacttttccgctgaaaatatcctgtatgttcatgatgtagaggttctgcctgttgagcagttcctgcaaggaatccacacggagcgcgttgtccacgatctgactgcggacttcactgttcatatatccggggaggtaattgcgcaaaggggtgaaggcaatgatgcaggcagcaatcagaaaaagcaccgccagcacggacaacagcaccgaaagcccgttcagcttggatacccgaagccccacgatttcttcaagcgtattctcattgataatggtgagtttatacttgaacttgaaattgttccaaaatgctttactccgttttcttggcatctttattaattattaatcttcctccaaatcttccaaattcaacaatccttcgggaagctcgactgtgatgagcttcttttcctgattgatctccactataaattcttcctgtgcaggaatgaggagttcttctccgtcctcctgttcgaccacaaaaagggtattcaccgtcgcggtatccacttcgaccacttcgcccagctcgccgtgacgaacgtcttccatgcggaaaccgacgaagaagttccacgacagttcgccgtcttccgcctcttccgcgtgcttcaccgggaagtagacttcgacattggtgaacatacgcgcgcgttccgccgtttctatgccttcaagcttcaccagtgcggtggagtccgaacgaaaacggtattcttcgatgaaaaacggtacgaaaataccgtcgagcaaacagatcagataatcgcagtccacacggtcgaagatgtcgtccgtgaaggtaaactgcaactcgccatgaatgccgtgcggcttgttgaatagtccgattttatatacttcttctttctttatcatattcgagtgattctggcgccgatggcgttaagtcgtccttcgatgttctggtagccacggtctatctgttcgatattgctgatcgtgctggttccttcggcgctcatggcggcgatgagaagggcaatccccgcacggatatcgggcgaagtcagtcgggcgccgcgcagcttgaagccgtggttatgtccgattactacggcacggtgagggtcacaaaggatgatctgagcccccatatcgatgagcttgtctacaaagaacaggcggctttcgaacatcttctgatggatcagtacgcttcctttggcttgggtggccactacgagcatcacgctcagcaagtcgggtgtcagtcccggccagggggcgtcggcaatggtcatgatggagccgtcgatgaatgattctatttcgtatgtttcctgtgcggggacgtagatatcgtctcccctctgctccagtttgatgcccaaccggcggaaactttcggggatgatgccgaggttctcgtaggaaacgtttttaatggttatttcgcttttggtcatggcagccatgccgatgaagctcccgacttcaatcatgtcgggcaatacggtatgctgtgtgccgtgcagttcttccacgccctcgatggtgagcagattggaagcgatgccgctgatctttgctcccatccggttgagcatacggcagagctgctgcaagtagggttcgcaggcggcattgtaaatggtggtagtgccttttgccagtacggcagccatcagaatgttggctgtaccggtcacggacgcttcatcaagcagcatatagctgccttgaagcctgtcggccgttatctcatagatgccccgcaactcgtcataacggaagtcagctcccaaattctgaatccccacaaagtgggtgtccagacgacggcgaccgatcttatctccgcccggcttcgagatcaacgctttcccgaaacgtgccaccatcggaccgatcagcatcaccgacccccgaaggcttgaacacttcttcaaaaactcatcactctccaaataagccagatcgacgttctccgccttaaaactgtaggtatcaacgccttcctttgcaaccgttactcccatctcccgcataagctgaatcagattgttgacatccagaatgtcaggtatattgttcaccgtcactttttcagcagtcagcaacgtggcacagataatctgcaaaacttcgtttttggctccttgcggatgaatctccccgctaagccgatgtcctccttcaattacaaatgaagccatttattttaagtaataggtaataaataacaagtaataggtaataggtaataggtaataggtaataagtaataataagtaagattctcaatacacgcaacacgccgaacgcagctatgctattacttattacctattacttattaccttttaatatcttctccgcggattattattccgattattattgtagttcacctttgggcggtagttctggttcaggcgttctgccatcagtcggatgatgtcgtctgtcagttgtagtttgccgccggaaagttcgtagaggtcttccgcaattttgcggtcgtctacggtatctttgttccatgccatgtagtctttcttcatgtggttgcagatcatggctgtcagatttctcttgtcgtttccttcgggaagttcgcaggctttcttgatcagcacttccagcgtgtgtccgtagtggcggtagcgcatgcgggtagtagaatatgggatcggttccggcttggtcaccaggttgtcttcgcggatgatttcgtagggatagtcaatatccagctcaaaaccggacatgatggccaggtgatcccaaagtttatgcttgaaatcgggcacatcacgcaaatgggggaacatatttcccataatgttgataattgtgttagcacaacgctgacgctcggcacggtcctgaatggtcaacgcataatctaccatgttctgtatgctgcggccgtactcgggaagcggcattcttttctgctgggtattgtattgcatcttttaaattaaaaattttgaaattaaaaattaaaagtcggaggacgacggtcactcactaatcactgtttcccgccaaaggcggttcacttactgaggcacttttttctactgaagtgcgttattcaagaagcgacttcttcggcaacgaggctacaaattctttcagatagaaaggttcgaagtaggccacatctttatagtcttctctggcaactgctttttctgccagcggatacatcatcttcgccaacggatggatgtcatcgataaaatgcgcattcggatgcgtaatcttctcacgacatttggcggctccatttccgtagaaataaacgggcgcttcgttcagaaactccagataggaattctcatcgacaatatcggcggcgatagcacgcttcacgttcaaggcacggtcgtaaacggcagcgtacacttccatacggcgggcatcgagcatcgggcagagcaacgcatcttccggcaaatcgtgatacagcaacacgggcacactcagcacttcgagcgtaggaagaccgatcaagggtacattccgtccgtaacaaatgccttttgccatcgaaactccaatccgcaatcctgtgtatgatcccggaccgcaactcactgcaactgcatctaaaggtatggcatgactatcaatgaacgacaacgcttcatcaacaaatactcccaaagacacggcgtgtgaagggcccttcaagtcttctttcacaaaaatcgtctgtccgtcttgacttgccgctaccgagcaaacagtggtagaggtttcaatattcagtatacacgacataaaaatcagcttattaaattgtcgcaaatttacatgattatttccaattcttaaaatattcgtgtacttttgcacaaaactttaagtatatgatacagtcgatgacaggatacggcaaagctacggccgaacttccagataaaaagataaacgtagaaatcaagtcgctcaacagcaaagcaatggatctttccactcgcatcgctccggcttatcgtgaaaaagagatcgaaatccgcaacgaaatctccaaagtgctggaacgtggaaaggtggacttcagcctctggatagagaaaaaagagagtgcggaaagcgcgactcctatcaaccaagttttggtggaaggctactacaaacagattcaggcgatctcggaaaatctcggcatccccgtccctaccgactggtttcagacgttgctccgtatgccggacgttatgtctaagactgaaatccaagagttgacggaagaagaatgggaaatggtacgtgccaccgttctcgaagcaatcggtcatctggtagacttccgcaaacaggaaggcgccgcactggaaaagaagttccgcgaaaagatagctaacatcgcactattgctcgaaaagataactccttacgaaaaagaacgggtggagaaagtcaaggaacgtatcaccgacgcgctcgaaaagacgctgaacacggactacgacaagaaccgactggaacaagaactgatctactacatcgaaaagctggatgtcaacgaggaaaaacaacgtctcaccaaccacctgaaatatttcatcagcacgctggaaagcggcaacggacaaggcaaaaaactcggtttcatcgctcaggaaatgggacgggaaatcaatacgcttggcagcaagtccaaccatgccgaaatgcagaaaatcgttgtgcaaatgaaagatgaactggaacagatcaaggaacaggtgctgaacgttatgtaattatttaatagtaagttgaaaattgaaaatgtcgacattttcagttttcaactttcaattctcaattaaacaaatgactggcaagttaattattttttctgccccgtccggttcgggcaaatcgactattatcaactatctgctgacgcagaacttaaatctcgcgttctccatttctgcaaccagccgcccaccgcgcgggacggagaaacacggggtcgaatatttcttccttactcccgaagagttccgttgtcgcattgagaacaacgagtttttggaatacgaagaagtatacaaggatcggtattacggaacgctgaaagaacaagtggaaaagcagttggagaaggggcagaacgtagtattcgacttggatgtagtaggcggatgcaacatcaaaaagtattacggtgagcgtgcattgtccatctttgtacagccgccctccatcgaagaactccgttgccggctgacgggtcggggcacggatgagcccgaagtaatcgaatgccgcatcgcaaaggcggaatacgaaatgacttttgctccccagtttgatcgtgtcatcgtgaatgatgatctggaagcggcaaaggctgagacgctggaggttatcaaagaatttctgaataaggaatgaaagaatctctgaaaaaacgaatagagagcatagaaaagaaggagggatcgaccgaaaaattcatgtatctgtgcggcattatcggcattgtagatatagtgttcggcatcctttcactttatctgcatttttggattgccgccggcatctttttcttaattgctgtgaggcaggctatcgtttttccaaaatggagaaaaaagctgagaatggaaagggaagccaagaagatgacagaaagtcaaggctgaaaaagaaagtctaaaagagaacccaaaagagcaaaaaaagaacaaagaatagaaagataagaaggcatcaagaagaaaaaagtaaaaacgagaagatgagaatggcagagagcaataaactaaaaaccggaatcttcagcgggtcattcaatccggtacacatcggacatctggccttggccaactatctttgcgaatatgaagaactggatgaagtttggtttatggtcagcccgcaaaacccgctgaaagcagggacggagctatggcctgacgacctgcgtctccggttagtagaacttgccacagaagaatatccccgcttccgctcttcagacttcgagtttcatctgccccgcccttcatacagcgtacatacgttggaaaagctacatgaaacctatccggaacgggacttctacttaattatcggctcggataactgggcccgcttcgaccgctggtatcaatcggagcgcatcatcaaagaaaaccgtattcttatctatccccgccccggatttccggtaaatgaaaacgggctgcccgaaacagtccgtctggtccattcgcctacctttgaaataagttcgacgtttatccgtcaggcacttgatgagaagaaagatgtaagatacttcttgcatccaaaggtttgggagtatattagagaatatatccgacagagtataacggataattaatcatccactcttgcttccgataatctgacatagaaaatcgtactccgtgtaatcccgcatttttctctacgaagaaacgcaaactcttcgattgcagattttcctcagcttttacttcaacagggatgacgctaacatctttttgtaaaaggaaatccagttctcctctggatgtatccgaagaccagtagtaaatactcagtcctttcactgacttcaattgttgtaatacatactgctctgtaatagctcctttataatcactaaacaacacattcccctccaataacgcttgcggtggaagcccgctcatagctcccattaatccggtatctaacaaaaataatttaaatgccgaaaagtcctcataagccgacaatgggattccggcttttttcactcggctaaccttgtaaataagtcctgcatcaatcagccactcaatagccaactcaaaatctttcgctctggctccttccttcacgacaccataaataaacttcttattttccttagccaattgagccggaacagaacgccaaatcatacgaatccgaggcacttcggcaataggagcatgtttggagaaatcacgatcataagaatccagaattgtctgctgtagctgtcgcacttcggcatagtctttatgattaataaaggcattcacaacttcaggcattcctccgacataataatactgtttgagcaaatctatcaatttagaacgaaaagcagcgatcagcccccagtctttttttgcaagtaaacgggcaaaagcctcttgcccgacagcctccaaaaactccgaaaaagaaagaggatataaatccataaaatcgaccttcccgacgggaaaagaatcattgctatgcatggcaatgccaaggagggaacctgctgcaaccacatgatactgaggagctttttcttgaaaatacttcaatgccgtcaatccgcgaggcgcttcctgaatttcatcaaaaataattaatgtctcagtatctactacgatgccggtcactaattgaatagccatcagaatgcgctcgacatcaaagtctttctgaaaaacatctttcatcacttcgttatcctcaaaattgatgtaagcaaactgtctgtaagctgatgatgcaaattctttcatcaaccatgtcttccccacctgccgggcaccacgaacaatcaaaggtttccgtgttgtcttctccttccagtcatataactgttgcattgcatctcttctcatatttattcttttataatcaacgatttatgaactgcaaatataagcaactgaatagaaaagaacaaaaagtcatgcataaaaatgtgctaataacacaaaaagtcgtacctaaaagtgtggagttcatcagaaagtcatacctaaaagtgtatctactctttgagacgatgaagcgtaatcattatgatttctgccggagcaccgattcgtacaggcatctgagaagtaccgatcccattagtaacaatcaatggcattttagttgaattgtacgccagtccggtcagaaagcgggtgccgtagtgggagttctgtatcggggcgtaaccgaatacgcgtacctgtccaccatgagtatgtcccgccaaagcgatgtccgtgttggccaccgaaacatcctccacgtagtcgggagtatgcaccaacaagataacgaagtcgttgggagaaagcgccagtgtgggcgacaccccattttgtttcaagtcgaaaggattgcgtactccggcaaggataatctgctgaccgtctttgcgtaatgtatcgacttcgtgttccagcggacgcatcccgtaatgcttcatcgtgcggattatttcgtcatggcagcgttcatagtcattatttcccattactccgaaagttcccatcggtgttttcacacgggccaatgcggcaaataacggttctacgtattcacagccttcctgatagtctcctcccatcagcaagacgtccggtttctgggcgatcaaaagatcgacaaggttgttcaagcctttctctttcagcagactcttgtaatgcaagtcggaaatgaaggcgatgcggaagccttcgaaggcttcggggacatcacggtgggtgaagtcatattccacgacacggtctatgccgctataagtggcagggacgttcacggtagaagacgtgatcttcgttccgcgaagtaccaaattacgttcttcctgctcggtcgcagcttctttcttcgctgttttcttctgctttttcgtcgaaactttcaagtcggcaagctgagaatgatccggagcaaacaagccgtcgatagcggcggaactgtccggacggacggaatcgacattgagcacaggacgaggcaggatcgatacaacattcttctttgacttacaagatacgaacaggaataatacgaatattatgaacaggtaatttatttttttcatcttctttggtttattttcttctacatataacacattcccccactatttgaggcgcaaagataggaaaaatcatgtatctttgtccgtcaaaacttattattatatattaaagcatggaagaagtaaagcgtaactcgctgcgtgcgtggatattagcagcacgtcccaaaactctgacaggagccattacgccggtcatgatcggtagcgcacttgcttatatggatggacattttcaatggttgccggcccttatctgctgcctgttcgccggtctgatgcaaattgccgccaattttatcaacgacctcttcgactacctcaaaggaaccgaccgcgaagaccggctgggaccggaacgagcctgcgcacaaggctggatttcaccgagagccatgcgaaacggaatcatcgtcaccgtcctgttcgcctgtctgatcggatctgcgctgctgttttatgccggatgggagctgatcatagtaggacttctctgcgtactcttcgctttcctctataccacaggtccttatccattatcctacaacggctggggcgatgttctggtcatcgtatttttcggattcgtccctgtgggtggaacgtactacgtgcaggcgctgacatggacttcggacacaacggtagcttctctgatctgcggactgctgattgataccttgctggtagtcaacaattaccgagaccgtgaagcggatgcacggagcggaaagcggacggtcatcgttcgttttggcgagaagttcggacgctatctttatttgatgctgggggtggcagcaagtcttctgtgtttctggttcttcttcgaaggacacttgtttgccgcacttcttccgttactctacctgattcctcatgtcctcacatggagacggatggtgcagattcacagtggtaaaaaattaaacagcatactaggtgagacttcacgtaatatgctgttaatgggtattttgctatcaataggattcttgatccgacattgatttattttccgtacatcttttcgtaatagccttgatagtctccgctggtcacctcttccacccagtcttgattttcaagataccatacgattgtcttcacgatgccatcttcaaatttcgtttcgggataccagcccaaggcgttcgtgatcttcgtgggatcaatggcataacgctggtcgtgccccagacggtctttgacaaaagtgatcagatcgttgttgatccagtcaacggagatttctccgtcttcacctttcactttctttttaaggacctgacgatattccggtttctcggtcattagtttacggatagtggcaatggtcagcttcacaatttcaagattggtttcttcgttgtgaccacctacgttgtacacttcgccctctttgccttcgcgcactaccaagtcgatcgctttgcagtggtcttctacgtaaagccagtcgcgcacgttgcttccgtcaccgtagacaggcagatgtttgccttcgagtatattcttgataatcaatggaatcagtttttcgggaaaatgataggggccgtagttgttggaacagcgggtgatcgttaccggcattttataagtgtcgtgataagccatgactaccatgtcggcactggttttcgaagcactgtacgggctgtgcggacaaagcggggtttcttccgtgaagtagccttccgcaccgagtgagccgtacacctcgtcggtagatacctgatggtagcgcactccttttctccaggtaggatatccctgttcgtccttacccatcacccaggcacggcgggcacaatccagcagattctgcgtaccgaggatgttggtgatcagaaacagttgcgggttttcgatactgcggtctacatggctttcggcggcgaagttcacgacatagtcgaaacggtattcggcaaaaaggctgtccaccacttcgcggctgcaaatgtctcctttgataaagaaacaacgttcgttgtcgatatctttggcaatagttcccagattacccgcatacgtcagggcgtcaagaaccaccacttttatatcgctgtgcttggccaagatatacttaatataattggcgccaataaatcctgcggcaccggtcaccagataagttttcatatatgattatttatgtttatttcaagggttgtttagacagttctatcaggtatttaccgtattcggtcttttcgagtttctgtccaagcagcagcaattgtccggacgaaatccatccttgccgccaggctatctcttcgatacagctgacgtagaagccttgccggttctgaatggtagccacgaagttggaggcttcgagcaggctgtcgcagtttccggtatccagccatgcgaatccgcgtccgaacagttccacgttcagtgttccttcttcgaggtacaggcggttcaagtccgttatctcatattctccacgtgccgaagggcggagagaagccgctttttccgtcacggtagcgtcgtagaaataaagtccgggaacggcataattacttttcggcaccagtggcttttcttccagagaaatcactttgccttgttcgtcgaactccactaccccgtaagcccgaggatctttcacgtaatagccgaagatgcaggctcccttctccacaccggcagcacgccggagcatagcggaaaacccttgtccataaaacatattgtccccaagaatcagacaacctgcctcaccgttcaagaaatcagctcccaacacaaaggcttgtgccagtccgttaggctgctcctgtattttgtaagagaaagacatcccgagctcctcacctgagcccaacaagtcccgaaacatcggcaaatcacgcggagtagagatgaccaagacctcccgtatccctgccagcataagcgtagacagcggataatagatcatcggcttgtcgtatacaggcatgatttgtttggaaatcgctttggaaagcggataaagacgagtggcgcttccaccggccagaataattcctttcattgtcgtctgagttattcattttactgtgtgcaaaggtcggaaagaaatctgacgtgacaaaatgaattgtaagaaatctatcctgccagttcaataacttcgaggtctttgaacgttccgttgtcgatgacaaagcgcaccattgtccgcactttatggaaaccggacatccctgcggctccgggattgatgtgcagcatgtccaacgttttgtcgtatttcacctttaatatatgggagtgtccgctgatgaaaagtttcggcggacgtgccatcaaactgccgataaccgaagggtcgtacttgcccggatacccgccgatatgcttgatcagcacttccgctccgtccaccgtgaagcggttcacctgcgggaacatcttccgtatttcttgcccgtctatgttgccgtaaactgcccgcaggggacggaaagccgctagcttctcggctacttctaccgaaccgatatctccggcatgccagatttcgtcgcacgattcaaaatattcgagatatttttcgtcccaataagcgtgggtatcggacaataatccaattcttgtcataattttctttgtttagtcctgcaaagatactatatttgggaaaatcttaaagcacatggaaagcaaatataattatttcaaacgtgatatcagctggctctcattcaactatcgggtgttgctcgaagcgctggatgagcacctgccgctatacgagcgcatcaatttcatctccatctactcctccaatctggaagagttttacaaaatccgggtggcggaccacaaggccgtggcatccggcgcaacggagagcgatgaagaaaccgtacaatccgcccgcgaactcgtggaagaaatcaaccacgaagtaaaccgccagctggacgaccgtgtacgcatttacgaagaaaagatactgcccgccctgcgcaaaaaccacatcatcttctaccaggacagacatgtggaaccgtttcaccagcagtttatcaaggactttttccgggaagaaatcttcccctacctgcaacccgtgcccgtatcgaaagacaaaatcgtctcttttctgcgagacaaccggctctacctcgccatccgcctctatccgaaggaaaacaggaaccccgccaaccggcagcctttctatttcgtcatgaagcagccgtacgccaaagtgccccgtttcatcgaacttccgccccgtggaaacaactattacatcatgttcaccgaggacatcatcaaagcgaacctcaaccttattttccccggctacgacgtcgattcgagctactgcatcaaaatatcccgtgacgccgacattctgatagacgacaccgccagcagcgccgacctcgtagctcaactgaaaaagaaggtaaaaaaacgcaagataggcgacgtctgccgctttgtctacgaccgtgccatgccgcaagacttcctcgactttctggtcgacgccttccgcatccaccgtgacgaactcgtccccggcgacaagcacctgaacctcgaagacctgcgccacctgcccaacccgaacaagtctctccgccgcatcgaaaagccgcaaccgatgaagctgaacatcctcgacgaaaaagaatcgatcttcaactacgtcgcccaaaaggacctgctgctgtattacccgtaccactccttcgagcatttcacccacttcctctacgaagcagtgcacaatccggagacgcgtgaaatcatggtcacccaataccgtgtagccgaaaactcagccgtcatcaacaccttgatagccgccgcgcagaacggcaagaaagtcaccgtatttgtcgagctcaaagcccgtttcgacgaagagaacaacctcgccaccgccgaaatgatgcaagccgccggcatcaaaatcatttacagcatccccggactaaaagtacacgccaaagtggccctcgtccgtcgccgcggactgaatggagagaaaatccccagctacgcctacatcagcacgggcaacttcaacgaaaagaccgccaccctatacgctgactgtggacttttcacctgccgcaaggaaatagtgaacgacctttacaacctcttccgcaccctgcaaggcaaggaagatccgaaattcaccactctcctcgtcgcccgcttcaacctcataccggaactgaaccgcctcatcgaccgtgaaatatcccttgccgaccaaggcaaaggcggacgtatcatcctcaaaatgaacgccctccaagaccccgcaatgatcgaccgactctacgaggcctccgaacacggcgtgcagatcgacctcatcgtccgcggcatctgctgcctcataccggagcagtcatacagccgtaacatccgtgtcacccgcattgtcgacagttttctggagcacgcccgcatctggtatttcggcaacgaagggcaccccaaagtatacatgggctcgcccgactggatgcgccgcaacctctaccgccgtatcgaagccgtcacccccatcctcgaccctgacctgcgcgccagtctgatcgaaatgctccatatccagctcgctgacaaccaaaaagcctgttgggtagacgacaaactgcaaaacgtattcaaaaaaagagcatccggcacccctgctgtccgtgcccaatacgatttttatgaatggctcaaaaaagacattgtaacagaaatgtaacacgtatgacatttttccgcaacgttaaactccgttctttgcctccataaataaacatacacaactttctttatggagacaatttacttatgcattatcattttcctgttcgtgctggccgtgttcgatctcatcgtcggagtcagtaatgatgcagtcaactttctgaattcggcggtaggcgccaaggccgcttcgttcaaaaccattcttttcatagccgggatcggtattttcattggcgcatccctgtccaatggcatgatggatatagcccgtcacggaatctatcagcccgagcatttctactttgccgaaatcatgtgtatactgctcgccgtcatgctgaccgacgtagtccttctggacgtcttcaactctatgggcatgcccacctccacgaccgtctcactggtcttcgagctgctcggaggaactttcgccctctccctgatcaaagtaaacaatgacgccacccttgcgttgggcgatctgatcaacaccgacaaagcactttccgtgatcatggccattttcgtgtccgtagccatcgccttcttcttcggtatgttagtacagtggctcgcccgcatcgttttcacgttcaattacacgaaaaacatcaaatacagcatcggccttttcggtgggatcgccgccacctccatcatctacttcatgctgatcaaagggttgaaagacagctccttcatgacccccgaaaacaaacagtggatacaggacaacacgctgctgctcatcgccagcttcttcgtcttcttcacggcactgatgcaagtgcttcactggctcaaagtcaatgttttcaaagtagtggtactgatgggcacctttgctctcgccctcgccttcgccggcaacgacctcgtcaacttcatcggagtccccctcgcaggctactcctccttcatagactacaccaccaacggagccggagcaagtccggacagcttcctgatgacctcgctgctaggccccgccaagacaccgtggtacttccttatcggtgccggcgccatcatggtctacgccctctgcacctccaaaaaggcgcacgccgtcatcaaaacctcggtagacctctcccgtcaggatgaaggagaagagaacttcggaagtaccccgatggcacgcacactggtacgtttcagcatgacacttgccaacggcacctcccgcatcatgcccgaaagcacgaagcagtggatcaactcccgtttccgcaaaaacgaagccatcatagccgacggagccgctttcgacctcgtccgcgcctctgtcaacctcgtcctcgccggtctgctcatcgccttgggaacgtcgctgaaactgccgctctctaccacctacgtcaccttcatggtagcaatgggtacgtcgctcgccgaccgtgcatggggacgtgactccgccgtctaccgcatcacaggcgttctaagcgtcatcggcggctggttcatcactgccggagccgccttcaccatctgcttcttcgtagccctcgtgctgcactacggcggcaacatctccatcatcgcactgatcggaatagcgattttcatcctcatccgcagccaggtgatgtataagaaacgcaaggcgaaagagaaaggcaacgaaacgctgaaacaactcatgcagaccgccgacagcgaagaagcgctgcaattgatgcgtaaacatacccgcgaagaactcgccaaagtgctggagtacgccgaaacgaatttcgaactgaccgtcacctcctttatacacgaaaacctccgcggactacgtcgtgccatgggttccacgaaattcgaaaagcagctcatcaagcagatgaaacgcaccggaaccgttgccatgtgccgcctcgacaacaacaccgtgctcgaaaaaggactctactactatcaaggcaacgacttcgccagcgaactggtgtacagcatctcgcgcctctgcgaaccgtgtcttgaacacatcgacaataacttcaacccgctcgacgccattcagaaaggtgaattcagcgacgtggccgaggacatcacttatctgattcagcaatgccgcaagaagttggaaaacaacgattatcagaatatggaagaggaaatccgccgtgccaacgacctcaacggacagctatcgcaactgaaacgcaaagagttgcagcgcatccaaagccagtcgggcagtatccgagtaagtatggtttatctgaccatggtgcaggaagctcaaaatgtagtgacttacatcattaacctgatgaaggtaagccggaaattccaaatggaaacagaaatgccgtaaggtggctcatcccccaaaagcacacaacaaaagggtttatcttcaaaaagtctatctgattaaataaaatgcattagagataaaccggaaaaagcaagaagggctgctcccaagtagaattggggcagccctttttatggttgggcggttgactgttatccaatctgccgggatattcttttatagatgtcaaaattctccaactaccgcattatcgggctcaaaaaacataatgtagcaaacaggggtataggtgaccccattttttgatactacacttttccataaatcctacatctcagagcaggtatgaatcatttcgcacaagaaatgaaatgaattaaattccactacctattactatacaattacctattactttcccatacaaaaatcccctttattcaaccccatatcatagacagatacggttttaaataaaaggggattctctagtttttaagagaggaggtcggtttatgaatctcccgtctttttagctttccgacgacggaagcgcaagagtgcttccaaaatatccaataacttttctaaaaataatttcatagcttccttctttagagttaaaaaacagagtgaatggagcaatttaataagggaaccgatcatgcattagtgagtcagcgattcagcctcattaaacggttgggtccggagcctcatcgtcgtcgcctccgggagtgcttcctccgccgggagtgtctccgcctcccgaatgatttttatcatcgtcgtccacaaagccgcccgctacgtccttgacgtggacaaattctactccggaagtcagtgcacgggtagtgacgccatcggcagaacgggtatattcgggagtaaactgacagcgcagcgaaacgatctgcgaactgctgactttactttccaacacgactccctttcctccggctttggcgatcatcgtaaatgtgcccaagccttcgagacgtactgtgcggctgttgagcaactgttcacgcatcacggacatcaagtttcgaatcacgttgtggacatcacccggtgtcagagaagccttctcggcgatcagctccgccatcttctgcgtgttgaccattttcgagaatttcacgaggcgggggtaatacagtttctgtcccgctttgttggcgatattcgcctggtaaggtttgtaaattaatggcataaggttgttttcctttctttttttaatggttgatgtaagttttctatgtgcaatcgattacggtgacaaaagtaggcgatggcaaaaaagtccggatacacgatgtaacgacttgtaacggaagagcaccagtcggcacggcctcgcacaaatactgcctccaaggacttctgtacaaagcaacaccaaacgactaaaaaaagcgtacctttacattggcaacgaaaatgaaagaaagaaatatagaaaagatagtaaaagcagtatcaaaagacaatgaaagcaaaaatcatgaaaccaacttccgaagaaaatgcaaccctgccccgcatacaggcatacagcaaaagccaactggccactctctacctgccccacatacagcccgcctccgcacgccgcactctccgcagctggatcgccaagaacacggcactacaaaacgaactcgcccgcacgggatattccgacaaagccatcctgctcactccggcacaagtaaggctcatcttccgtttcttgggggagccttgattcgagctgactatccgcatggcttcccctcccttcgggaaggggctgactaaaaagccccattcttcgggaagcaagtatatttccgtcacgccacgtccttttcaaatcttctcttcgttggccgtataaggcagcgtgaaccaaaaagtactcccctgacccagccgtgagacagcaccgatctttcctcccatcctttcgacgattgcccggcaaatggtgagtccgagtcccgtgccctgcacaaagctgttgagtttgacaaaattcccgaagatttcttccaaccgttcctccggtatcccgcaaccggtgtcggtgacatagaaatgcaggaaaccgtcttcgcgcacatcaaacccgaactcaatgctgccttccccggtaaacttcacagcattattcatcagattcatcatcacctgtaccagacggttacggtccgcctttacgacacattcggtcgtccggcggtgatagcagatacagatgccggactttttattcctcaaccggaacgtatcttcgagttcgataaacaggccgtgcacatctatcggggcgtagtcggactccatcgttccggcttcgatcttcgaaaggtcgagcacatcgctgataagctgcaacaggagtgtgttgttgttttcaatgatgttgatatattcctgtttctcttccgaaatccccctttccgccgacaccagcagcgaggaaaagccgacaatggcgttgaggggagtgcgtatttcgtggctgatgttggcgaggaaagaagatttgagcgtgttcgcctcctcggctttcacctttgcctgtacgagcgcttcctccatttcctttcgttgggtgacggtcatcgaagtgccgataaggctcagcggttttccgttagcgtcgcgctcgtccacggctgcgcgcacttctacccattcattctgttgcggggaaggaagccactgtctgcctacccgatattcctcgcgcattttctgcgtttcgccattggcgaggcgctcgaaggcgtcccgcacgcgttcgcggtcttcatcgcagattttcgcgaaacaggcggaggtgggcacgataatcaggttgccgtcatgcgtcacctcctcttcggtgacgtacaagtcgtggctgacgttgcacgagaggaggccggtccgcaaatcccatttccaaggggtcatgtcggcagcgtcgagggcggcggacaacttatggttggtggatttcagcatttgctgcgtcagcaccagttcggtattgtccacaccaaagacatcgacgcagcctttcgttttggaatgtatggagatgacggtcagatgagttttcgtcttctccagataatactgaaaggttatttgcctgttgtcattcagttcgctgtacctgtcgggcagttccggcgaataatccggattgagttcgctgtatttctttcccagtattttttctttgggcaggatgtatttctcgaaagtgggattcacttcccggtagacatagtcgataatccggccaccggggtcgaatatgagctcgacacgggcatagagaacgggcatgttttcgaccagactgctatagctcctcatgatctccagccgcctgctcctctcatgcagcgccctccggagccatatcacatagatgacggccagtgctatcaaagagaaaaacagggccagataatatttgttccgctcgaaaaaagtggggggcttcatacaaaaaaaagtgtcgtcgggacacaggccgagcaacagtccgctctctacgtagtcggcataattgatgacggatgggggcgtccccatcgctgtcgtttccactctgtgcggatgcgacgctccgtccaggcggcttttgatcaccgggagcagatgtttctttatttcactgtctgtccagaaatagccgccgatcaacaggaaaggcatcacttcctccgcttctttcctgcattgcgcactgatccagcgcctgtcggacatgaagccctgtttgcgcatatccgggacaacggtcgccatcagttccatgtgctcggcacatatgtcaaccgggctgttctggacgcgaaactctttatagacaggggccataaagtcatcgctccacagacagttttcggtataggaattgatgattaatagttgacaagaagaggggcggccggcataaatgtaagtctgaaatgcactgatcagaaagattgcaagtgccgctgtttttcgagttatccgcgcttccataaatagtgattgttttgattgtttgcggaaccgatcactgaatatcttaaaatattgctattaaatctttaaatattactatacaaaaaggtaagttctgtaagaacttggtagagcgacttatctgccagtttataatatattactaaagaaataaaaacaaacagacttattaaaagccgtcatctgcattctcagctcggaaaacggattcgttttacccgaactgagaatgcaataattagaatttgtaaataatgacaaacgtgcaatacggtagaaaccgacaaaggaaaacaaataaatatctaaaagagaaaacgtaggatgtcaacatcgaatatgaaatctgagtgaacaataaaacttatttttcagaataaaagcgtttctgcatggttttctcaataatatgattacatttgtggtgacattataacaagggaataaaatggaaatccatcgctgatatcgaatcgtttttttacgaatacagactaccaagttcttacaggacttacctcattccgtcagttgttctttcctttgtcccgatcattgtcgtcgctcaaaggtgttcgtcgtctttaccttcttttcctttttcgttcttttcctcgtctttcatgcgcaataatttatctttaccgaaatttatttctatcaccactttcttgggcgagtcgatatggtaactcacaattccggcatctctaatcaagaacataataatgacaaccagcatcccgaccagattttcggcaaagacacaattgacggacacgcagtgcgctaaattaaaaatcgtcgtccaattggacattctctttcccatccaggccgagtggaagcgcttgatcgacgatgccgaacagtccgaatgctgctgaagataagcgtcgtcaaagccgttatcccggctgactttcataatcgaatcgatgactttctgtttttcttcgtcatcactgtgctgcaagccattacattgctttttcttccattgcttctcttcgactctttcctgaagggcatccctgttctcgtcatacacggacttttcgccactctgatttgcttttttctgactcatgcttttctgatttgctttttcctgactcatgcttttctgatttacttttttctgacttgtacttttctgatttacagtcctttttacttcaatgtgttgttctctttcactactgttctggcagttttcttttttgttcattactaattatatttaaattaatccgacaaaattcgggatttacctttaacattttgggtcacgcgtgactctttctacatattttttcattttagtcaagcgtgaacggtttttattctacccacagtctacttttgccccgaaatcaataaataacaattgaatcatatgactgaaatgaaaaaacaacattccctcccacgggtacggctcatgaggcgggccgccgtcatccgtcgcaacaatgacatgaaccggcgtgatgcgctcatcatcgcccaccgaatcggtggactgataaggaagatgcacagggagaacgtgaaattctgctacaccaagcaggacggaaccgtgcgccacgctgtcggcacgctcaccggatatcaacacagttttcaccgcccctatatgccacgaccggaaaatacgtttgtagtctactacgacctcgaagccaaagggtggcgcacgtttcatgccgaaaatttcctttgcgtcgaatgagtttcgaagagcagatgagattcggagagcaaatgagtttcgggcagcagataaattttgaaatgagtttcggacagcagataagttttggacagcaaatgaatttcggagaacaaatgacttcagaagaacgaaaagaatgggaaacgctttgcagaatgtatcatgtggactctttgtatgaagccattcaagggtgtcgggaggagctggagtttctcgttcgctgtgccgaacggctcgaaccccgtgcagaggaggaatgagaaaggtcaaagaccggagtaagcgggcggaaccgcctcatgtcagcgaggaggctacgccgtttaacagtccttgtttatgccgtttctaccttgcaggctacgccgtttctaccatgcaggctgcgccgtttctaccatgcaggctgcgccgtttatccccggtggtttcggaaaagggatttctttttaacgaagtataattttattaacaatataaagaataaagtatggaaaattggagatttatcgaagcaaattccgattatatggtttcagaccacgggcggatattgagtttcaaaggcaaatcgaagttgataatcagcagcagcattaccgcaaaaggttatgagtacgtggccatccgccaaaaggggatatacgtcggctactctgtacaccgcttagtggcaacagcttttatccccaacccgaagcgtctcccccaagtgaaccacctcgacggaaacaagctcaacaaccacgtcgccaacctcgaatggtgcgatgcctacgacaatgtcatgcacgccatccggaccggtctgcgtccgtcgtcacccgccctctcccccgtcccctgtgccacaacggacgaggcaggaaatattctgcaagcctatccatccatgaacgcactggtaaaaggggaacaaatgaaccctaaacaacgtaattggctggtgctgcatttattacaccccgaaaggctgaagcaatcggccatgaagaaaaagccaagagccgaaagaagcggttcggaagaatgctttctgatagcacccgaaatacctgtgctgaccgtcaaagctgattcaatcggggagttcgaagcaggcaatctgctcggaacaggcaaatcaagcaattcaatcgggaagtccgaagcaggcaatctgctcggaacaggcagatcgagcaattcagtcggagagtccgaagcaggcaatctgctcggaacaggcagatcgagtaattcaatcgggaagtccgaagcaggcaatgtatgtgtgcagtcagtttcttctccccttgtttcatcgcctcttcctcttatttctctctttgttcccgtacaccattcagtgacgcaacactattaccgccgcctgtctcccgaagaatccgccatttttggtttcaacacttatatattgcccagagaaagaggacaaagaaaggagtttctgcaatgaaagacaccatcatcatccactgttccgccacccgtgcgggacaggacatcaccgctgccgatatcgactgctggcaccgtgcccgtggcttctggtccatcggctatcattacgtcatccgcctcgacggcaccatcgaaccgggacgagacgtcaccctcgacggggcgcattgtatgggctggaaccagcgttccatcggcatctgctacgtcggcggactggacaaggaaggccgccccgccgacacacggacagatgcacaacgcactgccctcatccgactggtgaaatctctgcaactggccttccccaacgtgaaacaggtcatcggacaccgggacacaagccccgacctcaacggagacggcatcatctcacccaatgaatacatgaaagcctgtccctgcttcgatgtgaaaaaggagttctagggagtagttgtacgcaatagtaactcgaatagttgtacgcaatagtaactctattctcctccttcgggaaggaggagtacccgtagggggaggtggtaggtgaatgcataatcctatcatttacaaagaaataggtataaacattatttctcctaccacctcggtctgcgaccactcctccttcccgaaggaggagaatagagatagaatcgactttttagttaccctcagttgagagacagaactgactatcaagtagcttatcaccatactgaaatgagctaaattaaaattaccgattcgccttattcattatttatcattcaatatcactctaaatattcaaaaagatggcccgtatttccaaacccggattagattatttcccgctcgatgtcaacttcttccaagacaggaaggtacgccgcatttccaaccgtcatcatgcagcaggaattgccgcactcacttccctgctctgcctcatctacaaagaaaagggattttacatcgcatggaatcaagataccttgttcgacatttcgcaggaagtgtgttgcgaggaggaggagatgcaggccatcatcgacgactgcctgtccgtcggactgttcgacacctatatatataaggagtacgggattctgacttcgcaagccatccaagagcaataccacaaaatcattaccgacagccgaaggaaatacaaacttccgctggaacagttttggctcatcaaggaaggagaggatggaacggaaaataattccgcagaaataagaaataatataaattcaaaaggtacagaagtgtatgaagcggaaagccatatagtaggcgcagaagtcaacgcaataaaaacaggaatcaatatcacagctacagaagttactaaaacaaagacaggaatcgacacgacaggcacaaatatccatgcagcaggcacaggaatcaatgctacaaaaacagtgaccgacgaagcagctatgaaaattaatgctgcaaaaaaacgagaaattgcagcaacaatcccacaaacaaaacaggaaacggatacagaaatcgaaagtaaatcggaaacagatactgagattaaaagcaaaccggaaagagaaagagaaagagacaaagaaagggaaagacaaagcaaaaccgaaaatgaatgggagaaggatagagagcagccgcccgttccgtcaaacggcgtttttcaggctgcgcctgttgctgtcaaaggtttgtctttagaaatctcgtccggaaaaagaggggaggaaaataaggaagaaagaagaaatgaaggaatagatcagaagggagaaactagatataacggaattcaatacgaaagaaaccagctagaagaagccaagcacaacggaacccaatacgaaagaaaccagcaggaagaagccaagcacaacggaactcaatacgaaagaagtcagcaggaagaagccaagtacaacggaactcaatacgaaagaaaccagcaggaagaagccaagcacaacggaactcagtacgaaagaaaccagcaggaagaagccaagcacaacggaactcagtacgaaagaagtcagcaagaagaagccccgaacgaaagcactgcttccggaggattctccgaatccctgctacgcctcaacatggacgccatcggcatccggaacgaaccaaccgtgaaagccatcctcgccctcgcccgacgcagaaagctgggtggtccctgcggcaccttatggaaagtcctcagctccgaataccgctccaccctgctcaaaaagaacgagccgggcgactacatcctctgggcactcaaccactcggcagaatttgaagacacctacaacggcatcctcaaaaagcgagttaggggaagatgaacatttttaagagggagatgaacatttttgagcacccacgtcatttatttctcccgccaaacgcatcataaaacaataatttatcctatctttgtagaataaagaaaagcctcttcactatacatgcgaagagaaacatctctttacaacataaaagagaaacaaccaaaacaatgagcaaatttatcaatccgttcaccgactacggattcaaactaatattcggcagagaagtctccaagaatttactaatcgaatttctgaacgaccttctcgaaggtgaacgagtgataaccgacttaacgtttttgaacaacgaacagctgccggactacccggaaggacgaggcatcatctacgatgtctactgcaccacggacacgggcgaaaagataattgtcgaaatgcaaaaccgcatgcagagcaattttaaagaacgctccatcttctatctctcccgtgccatcgtcaaccagggccggacggggcacgactggaaatttgaaataaaagctgtttacggagtctttctgatgaatttcatcatggacaagaacataaaactccggacagacgttattcttgcagacaaggagacaggtgaactcttctcggagaagttccggcaaatattcatcgccctccccctcttcaaaaaaagcgaagaggaatgtgaaacgaattttgaacgttggatttatatattaaataatatggaaactttaaaacgcctgccattcaaggcacgaaaagccgtcttcgaaaaactcgaagagatcgctgatgtggcttctatgtctccaaaggagagagagctatacgacaatagcgtcaaagtgtaccgggattatttggtgacaatggatgcagcggaaaaggaaggaataaagaaagggatggaagaagggctaaagaaaggacttgaagaaggacttgaggaaggcctgaagaaaggcctgaagaaaggtcgcgaagaagccttgaacatctttcagacagccatcgacatgaaaaagcaaggaattgacaatcaactcattgccgaaaagaccggtctgcccctatcgctcatagaaagcctcaaataaaggtagaacctaagcatccgccccctgaaaacaagccaagtacctgcccgaaaaagatgactgagatcgaaaaagaaagggaaaaggttgcgattatagtaagtgagccgggaagccaagttgcggaaagaagcacttatgttctgatttacaacaagatagaataaaaaaggaggaaaaagagaggttttaaaatatcaataagtcttagaagaacttggtacattcgtgattgtaaacttaccatcaatatccgtgatagtaccaagagtagtgccattcactaataccgaagcacctacaacaggcaggccatcttcctcggcggttaccacaccggtaactcgggacgtctgcgctgtcaccagacctatacccaaaaaaaggaaggtcataaagaacatcaattttcttttcataaattctctcttaaatttaacctataaatagacttctagtctctaacagggtgcaaagataacactatttatatcaaaattaaaaaagtgttacgtttttaactataaagtatcatattgaaagaatttaatcagtattttgataaaatgagaagatttgaatgcgattttaataatattcaaattacattacacgacataaagatagtgttaaaatcgttattttcataaaataacatcagcgaatcattcgaaatgctatctttttatcattttatgccttaaatagccccaaaaacacttaacgcttcccgaaagggcaactccccgccgtaccaagttcttctaaaactttgcgcgtttcctatgtaggaatggttccgcagacagtaacgatcaaacagggcgttatcaacgtagtattaaaaagtgacgccaaagccctggacgaagtcgtagtaacggccatgggtatctcccgcgaaaagaaagcgctgggctacgccgttcaggacgtgaagtccgaacaactgacccaagcttccaactccagcctggcaggagcgttgcaaggaaaagtttccggtctggatatcaaaccttcgagcggtatgcccggagcatcttcacagatcacgatccgtggcgcacgttctttctccggagataacacaccgctttacgtaatcgacggaatggcagtgaccagtactcctgacgtagatacggacatacagaacaacggtagtgtaagcggtgtggactttgccaaccgcgcggtagatatcgacccgaacgacattgaaagtatcaacattctgaaaggacaggcggcttcggcactttacggaatccgcgcatccaatggtgtgatcatcatcaccaccaaaagcggtaagggactggaaaaaggcaaaccccaagtcagtttctcatccaatgtcagttttgacgtagtcggtcgcctgcccgaattccaaaagacgtatgcacaggggtccggcggaagatacagcccaacttcaggattatcctggggacctaagatttctgaactgtccaacgatcccaattatggcggcaacaccgacaacgaattcactcaaaagtatggcatgcaatccggcaaatattacgtgccgcagcgtgcttcagcaggtcttgacccttgggctactccacaggcttacgacaatacaaaagaattcttcgaaacaggtatcacttggagcaactcgctgaacgtggcacaaacgctggaaaaaagttcatactccgtttctcttggaaatacgcaccaagacggtattatccccaaaactggcatggacagatacaacgtgaaagtaagcgccgaaacgaaactgacgaataacttcacaactggttttgcaggaaactacatcacgacttcgattgacaaggcggtaacgtccggaaacggactgctgagaactgtttacgcttcgcccgcaagctacgatctggcaggtatccccagccatgtagacggcgacatttataagcaaaactctttccgtggaaattttgacaatgcctattgggctattgacaacaacaaatacacagaagacaccaaccgtttcttcggaaatgtatatgccacttatcaaacagatttcggaacggccaaccataaactgaacgcgaaatatatgttaggtgtagacgcttataccactcactactctgacagctacggatacggaagtaacaccggcggcggtcgcggccagatagaaaactacggttggacaaacgctacctacaactcattgctgaccatcaactacgactggcgcatcaatgacgactggggattgaacgctgtagcaggtaacgaatttatccagagcaacagaaagaaatactacgaatacggaacaaactataacttcgcagggtggaatcatatcaacaatgcaaccactcagcttacagaagaagaaagatggaaaaaccgtactgtcggtttcttcggcaacgtatcggcttcgtacagaaacatgctttatctgactgtgaccggacgtcaggactatgtgtccaacatgccgcgcaacaaccgttcgttcttctatccctctgtgtcagcaggtttcatcctgacagaacttgatgaactgaaaaatgatgtagtcaactacgccaaactgagagtttcttatgcggaagtaggacaggctggtgatttccttgagaattattactcgactcccacgtacggaggaggattctattcgctgactcccatcatgtaccccatcaaaggtactactgcctataccccgtactacacaatattcgacccgaatctgaaaccgcagaatacacgttcgtacgaaatcggtgccgacgtgaacttcttcgacaacctgattacgttgaattatacttattcgcgtcagaacgtcaaagaccagatattttcagtgcctttggcgtcttctaccggtgccagcaaactgttgacaaacggtggtaagattcataccgacacgcacgaaatcacattgggattcaacccgatccgcacgaagaatatcaactgggacttcggtttcaactggaccaaaatcgacaactatgtagacgaactggctccgggtgtggaaaacatttcactgggtggttacgtcactccacaggttcgtgcatcagcaggcgaaaaattccctgtaatctatggcgtaggatacaagagagacgctaacggcaatcgtctggtagacgaaaacggtttgcctgtcgccggtgaggcacaggtgatcggaaaagtttctccggatttcgtaatgggtttcaatacgtcattgcgtctgtggaaatgtaccatcagtgctgtacttgactggaaacaaggtggccagatgtacagcagaactaccggtttgtccgactactacggcgtcagcaaaagaacagagaatcgggaaggcacgatcatctttgacggttacaaacaggacggaaccaaaaacgatatcgccatcaccggagccaatgcgcaacaagtgtactacagccgcctgaacgatattgacgaatcttctgtatacgacaactcgttcatcaaactccgcgaagtggcagtaagctacaaagtactccagaaaaagtggatggaactttcggtgaatgctttcgcaagaaatatcctcgtctgggcacagatgcctgaccttgatccggaagccagccaaggaaacaacaatatgtccggagctttcgaagactattcaatgccgcaaacagctagctttggtttcggctttaatattaaattttaatctgcaagacaatgaaaaaatataaatcaataggaaaattgctggcagtttctttctttactgctgtcattgcttctgcttgtacggaagatgcaatggacaaagtcaacaagaatcccaataacccgcaggatgctccggcgaagtttttgataacagacttgggagtcagcactgcattcagcacagtaggaggagatttttcactctattcgtccgtttacatggagcacgaaacaggtatcggcaaccaactctaccgggcagaagtccgcagcggagaaccgaccactgccacgacctacaacaatgcgtggatcagcgtttacgccaatataaagaatgcaaagattgtaatcaacaagtgtcaggaagacccatcggaaaaaggcaatgtagtaactgaagcaatagccagaatccttcttgcctacaatggtgcggtagtagccgatgtgttcggagacacaccgttcagcgaaaccggagttttaaatccggacggcacaccgaagtatatgcaacctaaaattgattcacaagagtctatctacaaagaagtaatgcagaacctggatgctgctatcacacttttgaaggatggaacagccgaagacgaaggattatcaggtgcagtgggatcaaaagacctcatctacggatcagaccaagatgcacaagccggtctgtggcttaaaacagcttatgcactgaaagcacgctatacaatgcgtcttcttaacaaaagcgccaatcagactaccgatctccaaaacattctgacctatgtaagtaaatcatttaccaatgcaaatgaagaatgtaaactggacatttatgacggtgattctcaactaaatcccctttgggctttcagctatagccgcaacagccttgcagccagcgaaagtctcatcgagaaatttgcaacaagaaatgacccgcgagctccacgctcatttatccaacctgatcctagcggaaatgttgtatatggaggcggtgcaaatcaagccacaacaatcgatgccatcaacgtagctcctaacggcacccctcaggaattacagaataattatggcatgtctatggcctcatgggctatgaccgctcccacacaactgatcagttaccatgaagtaaaattcctcgaagcagaagccctgtgtcgtctgggtggcagagtagatgaagcaaaagccgctttgaaagatgccgttatcgctgcatttgccaatttggagaatacagttgccgatgccgccagaaactggctgggcgggaaagccgatttcttgggtgacgccgttgccgaagcctattttgataatgaagtagctcctctttttgccgctaacccattaaaagaaacaatggtacagaaatatctcgcattctttggtgcatccggcgaatctttagaagcttacaacgactaccgccgtatgaaaggtgcgaacgaaaacttagtggaactgaaaaacccgctgaactctaacaaattcccgctgcgtttcggttacggagcagacgatgtattggcaaatgtagccatcaaagaagcctttggtgacggacaatacgtatactccgaacccgtttggtgggcaggtggaagccgataaaaatcgctcttaaaatctctcaaaggagagactttacatagagtcgtttctgaactctaacaaattaacggaaacgaacagaaataggccgaccgtgaggtccgcctattttacttttacagccgtcagctatttgttaatatcacaaatacaaaacaggaaaaacacccgaattgttataccgtttttctactcagcgataccgttttaccggataaagatcatgcttgccggagcaaagaccggtttaacaaacaaaaaagatcagtctaccggacaaaaaaagagatcagtctaccagaccaattcggggaaatacttcgtcagcgtattgcgcagaatcgacagtgtgatcggtttcaccagcacttcgctcgctcctgcgttcatcgcattctccttgtcagagctgaaagcgtaggcggtctgcatgatgatagggatttccttgttttctccgcggatgatcttcgtagcatccagtccgttcatcacaggcattttgatgtccatcaggatcgctttggcctcgttgccgtattccttgaacagtgccacgatttcttcgccattcttggcccactgtatatcacatttctttccgatgattgctttgatcaatttgaagttgctgtcgtcgtcctcggccactaagataagaggtctgaattcatttgtttgtccgccttccatatcgtttctatattatttttaaaattattctctaaaattactttttagtcaacatatttcagttaataatgcttttcagcccgcaagttataaaaaagattgatatatttcgctatctttgcgcctcaaattataaagaattgtatgatttcgatagacggactagccgtagagtttagcggcactaccctatttagtgatatttctttcgttattaatgaaaaagaccgcatcgccctgatggggaaaaacggagcgggaaaaagtaccttactcaagattctggcaggagtcagacagcctacccgtggcaaggtttcggcccccaaggattgcgtagtagcctatctcccacagcatttgatgacggaagacggcagaaccgtgtttgccgaaacggcacaggcgttcgcgcatctgcacgagatggaagcacggatcgacgcactgaacaaggagctggaaacacggacggattacgaaagtgacagctatatggcactgatcgaggaagtgtccgccctcagcgaaaaattttactccatcgacgcaaccaattacgaagaggatgtagagaaatcattactcggactcggattcacacgcgaagattttcaacgtcagacgagtgacttcagcggaggctggcgcatgcgcatcgagctcgccaaactgctgctgcaaaaaccggacgtactcctgcttgacgagccgaccaaccacctcgacatcgaatcgatccaatggctggaagattttctgatcaataacggcaaagcggtcatcgtgatcagccacgaccgcaaattcgtggacaacatcaccacccgcaccattgaagtaacgatgggccgcatctacgactataaagtaaactactcccaatacctgcaactgcgcaaggaacgccgcgaacagcaacagaaggcttatgacgagcaacagaagttcatcgccgagacggaagccttcatcgaacgtttcaaggggacgtattcgaagactttgcaggtgcagagccgtgtcaagatgctggaaaagctggaattgctggaagtagacgaggaagacacttcggcactgcggctgaaattcccgccttcgccccgttcgggcagttaccccgtcacgatggaaggcgtcggaaagacgtacggcgatcatgtcgtgttccgcaacgccaacctgacgattgaacgtggcgacaaggtggctttcgtaggcaagaacggtgaaggtaaatcgacactggtgaaatgtatcatgaacgaaatcgaccatgacggcacgctgacgctgggacataacgtgcaaatcggatatttcgcgcagaaccaagcctcgctgatggacgaaaacctcacggttttccagacgattgacgacgtggcaaaaggagaaatccgcaacaagatacgcgacttgctgggcgccttcatgttcggcgggccggaagagtctatgaagaaagtgaaagtgctctcgggtggcgaacgtacccgcctggcaatgatcaagctcctgctggaaccggtcaacctcctgattctggacgagccgaccaaccacctcgacatgaaaaccaaagatatcctcaagcaagcactgatggatttcgacggcaccctgatcgtcgtttcgcacgaccgtgacttccttgacggactggtgacaaaggtctacgagttcggcaataagaaggtgacggagcatctttgcggcatctacgaattcctcgaaaagaagaaaatggattcgttgcaggaactggaaaagaaataataaacaataaaaagacattatctgctttaggtgaaagaaaaagtatttgtatatttgtgcaaatttaataatagacttaggttctgcaataaaggatgaaagggaagaaacgattcatagtaacgatgctattctttatcaacatcattatgttggtagccgccgttattccccatcaccaccaccccaacgggatgatctgcatgaagcaggaccaaccggtagagcagcaatgccccaaccaccatcatcaccccgcaagcgattcatgttgcagcagcgaatgcatgacccgcttccactctcccatcccctccgtgcacacggacagcggaccgaattacgtattcgtcgccaccctgtttacggatacgatcatcgaacatttattacgaccgcaggaaagacgagtcaaaaattactacatctatcgtgaatccctgcacggtacgaaaatacctcgtacctcctcacttcgggcccctccctactctgtttttgcgtaatgacgtaaatgcaagcaagttgcatctgcgttactctatctttgtagcgtacaaaaacagtaaaacttagtaggaaaacaacatttatgaagaaacttatctttataggagtcatgggattattcgtcctgggctcttgcaatagtaaaaatactggtcatgaagggcatgaccacgagaccgtcacacacaatcatgatgaacacgaaggacatgaccacgaagtggaaggtcatgaccacgaagccgaaggagccgaccattcacacgaaggtgaatgcagcggaggacacgatcacggcaaagttgccaccagcgaacccgccggcgagcacagcgatgaaatcatcctcccgaaagcgaaagctgacgctgccggtgtaaaggtaaatgctatcacaccggcccccttccagcaagtcatcaagacaagcggacaggtactcgctgcccaaggcgacgaatcggtggctgtagccacggtggccggagtcgtttctttccgcggcaaggtgacggaaggaatgagcgtcggtcgcggcactccgctggtgactatttcttcgcacaacatcgccgacggtgaccccgtacaacgtgcccgaatcgcttacgaagtatccaaaaaggaatacgaacgaatgaagtcgctcgtcaaaaacaagattgtgtccgacaaggatttcgcacaggcggagcagaactacgaaaacgcacgtatcagctacgaagcgctcgccaaaaaccactcggccatcggtcagaatatcaccgcgcccattgccggatacgtgaaaagtattctggtcaatgagggagactacgtaaccatcggtcagccactggtcagcgtgacgcagaaccgccggcttttcctccgtgccgaagtatcggaaaaatactacccgtatctccgcacaatcagttccgccaatttccggacaccttataataatgaggtctacgaactgaatgaactgagcggcagactgctttccttcgggaaaacttccggagacaactctttctacgtgcccgtcaccttcgaatttgacaataaaggagaagtgattccggggtcattcgtcgaagtttatctgctttcctcccaactggaaaacgtgatatccgtgccccgcaccgccctgacggaagagcaaggcatcttcttcgtctacctgcaacttgatgaagaaggctacaagaaacaggaagtgaccctcggcgccgacaatggcaaaagtgtacaaatcctgaccggaatcaaacctggagaccgtgtagtgaccgaaggcgcataccaagttcgcctggcaagcgcaagcaacgccatccctgcccacagtcatgagcactagcggcaaagcgccgcatccaagttcccttgcggcacacacagaactcatttatagttacgcaagtttatcccctgtccggcacttctcaaaagtaaaccgggaggaaccagacttaatcaatgaaatatcatgctaaataaaatcatacattactccctgcacaaccgactggttgtgctctgcgcggccatcctcctgcttattgcggggacttacaccgccatgcacacggaagtagacgtgtttcccgacctgaacgccccgacagtggtcatcatgaccgaagccaacggtatggcagccgaggaagtggaacagctcgtcaccttccccgtcgaaacagctgtaaacggggctaccggcgtgcgccgtgtccgttcttcttcgaccaacggtttctccgttgtctgggtagaattcgactggggcacagatatatacctcgcccgtcagatcgtcagcgaaaagctcgccgtagtcagcgagtcacttcccgtcaacgtgggcaagccgactctcggcccccaatcgtccatcttgggcgaaatgctcatcgtcggtctgaccgccgactccacctccatgctcgatctgcggacgattgccgactggacgatccgcccgcgcctgctctccaccggaggcgtggcacaggtggcagtgctcggaggagacatcaaggaatatcagattcagttggaccccgaacggatgcgccactacggcgtatcgatgggagaagtgatggccgtcacccaagacatgaacctaaacgccaacggcggcgtactttacgaatttggcaatgaatatatcgtgcgcggagtactctctacccccaaagtggaagaactcggcaaagcggtagtgaaaacggtgaacaactttccggtgacgctggaagacatcgccgacgtgaaaataggtcccaaagccccgaaactgggtacagcctcggagcgtggcaaaccggccgtactcatgaccgtcaccaaacagcccgccaccagcacgctggaactaacggacaaattggaggcctctctgcaagacttacagaaaaatttgcctgcggacgtcaaagtctccacggatattttccgccagagccgctttatcgaaagctctatcggcaacgtgaaaaagtctctttttgaaggaggaatctttgtcgtcatcgtacttttcctgtttttggccaatgtacgcactacgctgatttcccttgtcacgctgccgctttcactactcgtctccatcctcacgcttcactacatggggctgactatcaacacgatgagtctgggaggtatggccatagccatcggttcgctggtcgacgatgccattgtcgacgtggaaaatgtatacaagcgactgcgggagaaccgtctgaaagcggaagccgaacgcctcagcacgctcgaagtggtattcaacgcttcgaaggaagtgcgaatgccgattcttaattcaacgctgatcattgtcgtcagctttgtgccgctgttcttcctgagtggaatggaaggacgtatgctggtaccgctgggtatcgctttcatcgtggcgctgttcgcttccacggtcgttgccctcacgctgactccggtgctctgctcttacctgctgggcagcaacaagacgaacaaggaactgaaagaatctttcgtagcccgctggatgaaaggcatttacgaaaaggcgctgacatgggtgctggctcacaaacgggtgacactcggcagcaccatcgtccttttcctgatcgccctaggggtattctttacgctcgggcgcagcttccttccttcgttcaatgaaggctcgttcaccatcaatatcagttcgctgccgggcatatctctggaagaaagcaacaagatgggacaccgtgccgaagaattgctgctgacaatccccgaaatacaaaccgtagcccgcaaaacgggacgtgccgaactggatgaacacgcgctcggcgtaaacgtttcggaaatcgaggcaccgtttgaactgaaagaccgcccgcgcagcgaactcgtcgccgaagtgcgcgagaaactcggaacgatcaccggagcaaacatcgaaatcggtcagcccatcagccaccgtatcgacgcgatgttgtccggtacgaaggcaaatatcgccatcaaactcttcggagacgacctaaacaagatgttctcgctgggcaaccagatcaagggagctatcagcgacattccgggaattgccgacctcaacgtggaacaacaaatcgaacgcccgcagctgaagatacagcccaaacgggaaatgctggcgaaattcggcatcaccctgccggagttttctgaatacgtgaatgtggcgctggcaggaaaagtgatttcgcaagtgtacgagcagggcaagagtttcgacctcatcgtcaaagtgaaggacgacgcacgcgacgaaatggagaaaatccgcaacctcatggtcgacaccaacgatggacgcaaagttcctctgaactacgtggcggaagtggtttcctccatgggaccgaacacgatcaaccgcgaaaatgtaaaacggaaaatcgttatctccgccaacgttgccgaccgtgacctgcgcagtgttgtaaatgatattcagaagcaggtagacgccactatccagttgcccgaaggctaccacatcgagtatggcggacagttcgaaagcgaacaggctgccagccgtgtattggcgctgacatctttcatgagtattgtcattattttcctgttgctttaccacgagttccgcagcgtcaaggagtccggcgtgatcttgctgaacctgcctctggcattgatcggcggcgtttttgcgcttgtcatcacgaccggcgaagtaagcattccggcaattatcggtttcatctcgctgttcggtatcgcgacccgcaacggtatgctgctcatcagccactacaaccacttgcagcaagtggaaggactgaacgtatacgacagcgtggtacaaggctctctcgaccgtctgaatccgatcctgatgacagctctctcctctgcgctggcactgataccgctggctctgggcggtgatctgccgggcaacgagattcaaagcccgatggctaaagtgattttaggcggacttttaacatctactttcctgaacggtttcatcgttccgattgtttatctgatgatgcatcgccagcgtagcgccggagcaaattctccatgcggcgtatcggcggaacaggcataattatcagttaaatatagctactatatatagagaaacaaataaaaaaaagtatgaaacgaatcatcatcataggctctttggtaagctgcgcacttctcgccctcacgggcgaagtgcaagcccaaagcggcatcgaacaggttttgaagaatatcgaaaccaacaataaggagttgcaggcgaacgcccagctcatcacctcgcaaaagctggaagccaaaacggacaataacctgccggacccgactttatcatacgcccacctctggggagcgaaagataaaaacgaaacgatcggcgaacttgtggtctcgcaaagtttcgactttccgagcctgtatgccacccgcaacaagctgaatcgtctgaaagcgggtgcttttgacagtcaggcggatgtcttccgccaagagaaactgttgctcgccaaagaagtgtgtctggacattatcatgctgcgccagcaaaaacacatcttggaggaacggctgcgcaacgcggaagaacttgccaaaatgtacgccaagcgcctccaaaccggagacgcaaacgccctcgaaacgaataaaatcaatctggaactgctgaatgtcaagacggaaacttcgctgaacgagacggcactgcgtaataagttgcaggagctgaacacgttaaacggcaatatccccgtagtgttcgaagaaagcacgtatcccgcgacgcctttccctgccgactatcagatactgaaatcggaagtgctctccgccgaccgcacgttaatggcgttcaacaacgaaagcctcgttgcccgcaaacagatcgctgtcaacaagtcgcaatggctgccgaaactggaactcggctaccgccggaacaccgaaacgggaacgcctttcaacggagtagtagtgggattctccttcccgcttttcgagaaccgcaacaaggtgaaaatagccaaagcgcaagcgctgaacatcgacttgcagaaagacaacgccaccctgcaagtggaatccgaactggcacagctctaccgggaggccaaaacgctgcacacctctatggaggaatacaggaaaacttttcaggcgcaacaagacctcgcactgctgaaacaggctctgacaggcggacagatcagcatgatcgagtattttgtcgaggtatccgtcatttatcaaagtcatcagaattacctccaactggagaatcaatatcagaaggcaatggcacgaatttataagagcaagctataaattcccgctttatttcgcccgattattgaataaataaaaagaatgcattacatttggggactgtaaaaaacactaaactattatgaaaactaaaaccctctcttacacccccatcttgttttgcattcttattttatggagtgcctgtaaagacgatgccgatgcccccctgcggttttacgacagcaaatacgaagtgcccatgggaggaagacgctacctcggaatcgaaagcggaaacggagactactctttggaaatcggaaatccccgcatcgcaagtgccggaatcgaaagcggctggagcggagttcccgccggacgaatgatttacatatccggaattctcaccggaagcacgtatctgaaagtgacagacaacgccacacaggaaacgctcactctgcccattaaagtggtggactactacgaagatctcaatctgatacacggctcgtcctccctgcgtcccaatggggacgagaacctactgccgggtgttgacgacattttccttgtcagcaacgctgcccgtgacgcttatttcttcaaacaaggacaacgaaccgctttttcatcgggactcgaactgatcaccaaaggaacttatgcactgaagcaagaggacgagaacaaagccacactgacccttactttctcattggatgcctcaccggctacggaacaccatttcaccgtatggggaaacacgtacctgcttcaccggctggacaagaacttacatctgaactggggcacgccgcccattggagaaacacggacatcacctgccccgcctccggcctacacactggaagaaataacggaaggagcagaaccgggaacaggcagacaggtcggtttcattctgaattataaggaaatacccactggaatacttccctaaattatggatgataaattagccgagctatcaagataagcattctatccgttgtccgtttctttcggaaataatctttacagcgtacgtatctcctccggcaaatacccgctgcggatacgccactcctgcggataaagattattggcacgattccctatattcttcacaaatccgagaggaatattccggtaagtaagcaagatataaccacgaggggctgtttccgacaaggtaatagcctcttttcgtaaataagcgatagcctgttcataactcacctcttccgtatcaaaagcatcctgccgcaagagcgtagcgctcattgccagcgcatgagcgggaatcaaatctctccctttcacttcaccagtcagaacgcctgcctgtatcactttcagatgctgtttcatggcagccagttcatcggtatatcgttgcggaaatgcgacgatgcccgcgccttccgcagacagggtgtatttttcgacattttcctgcttcagccagttcagtgccatccccatgtgttctttggaaacgggagaagcagccgctccgcctttcttatcttttttcttggacgcctttgcttttgagaatgaataggctgccggttcatcttccgcatccggtttacgaagtgccgccagaaagaatccttcgccttttgtcttatgaggaagaaaatgacagacagacaaacttccctgagattcatcctctccatcgagtaaattccctgttatattccactcgttccgcacctccagaggcaagagctccgcaccgaattcctgctgaatccagcagacgttctcttcatcttctttgctattataggtacacgtactatatattaatatgccgcccggtttcagacagggccaaatatccgcaataatccgccgctgacgctgccagcagatctctacattctccgggctccattcctccacagccacagggtctttacgaaacattccctcgcccgaacaaggcacatcggtcagaatgacatcaaagaaagatggaagtgccgagaaatcagccggatcattgttggtaaccaccacatccggatgcccccacttcgtcagattctccgccagcacctgtgaacggttccggatcacttcattcgccaccagcagactcccttccggaagcacgctgcgcgcatgggttgattttcctccgggcgccgcacaaagatcgagcatcaccaccggagactcgacatactgccgcagcacctgctccacaaacatggacgaagcctcctgaacatagtagcaaccggcatgaaacaacgggtcgaacgtaaaagtcagacgctcgtcaagatagtagccatcggatgcccagggaactttgttgaaggaaaaatgagcagaactgtctgtcagcgaacttaatccttcctccttcattctcaatttattgatccgaatgctgacgggaggctcctgctgcaaggcggcagccagtttttcatattcttcattgcccagtaaggcacgggtatagtcgataaaagaagcgggtaaattcatttttcatttattaattcctgcaaatatcaaaaatatttcgtctctttgcaactttctgacatacgaactacgtctaacagacaaagaaacaaataaaagaattaatatatgaaacggattttaattgctttactggtcatgatgaccattttctcgctggcaaacgcccagaaacaaacgactatcgtgaacgactctaccggaaacgtaaaagtgaccgtaacgaaagggaaaggcaaggatgccaaggttaatgtcggcaacacggccgtcactgtgatcggcatcgatgacgaagacgccgacacgacaagtgtagatacgggcaaagtgagtagctcctcgcgcggctctcacggaaaagcgagcttcaccatcagctctgacgacgatgacttcccgttcaataatttcggagatgcagtcggaggaggtattctggtagccatcatcagcatcattgccatattcggaatgccggtattcatcatatttgtagtcttcttcttccgctacaagaaccggaaagcacgctaccgtcttgccgaacaggctctcgcagccggtcagcctcttccggaagaattcatacgggagaacaaatcgacagaccaacgtacacaaggaatcaaaaatacctttacaggcatcgggctcttcatattcctctgggcgattaccggcgaattcggaattggcgctatcggactgctcgtcatgtttatgggactgggacaatggctgatcggctacaagcaacacgccaacgagaataccaagaacagagaaaccgccatcagaagcaacgacatcatcatctcggagaagaacgacgaagagaagaacgaagaaaatagatgagccaactcaacgatatatcgctagtcgcacaggtcgtggtgttcaagaacaccagggccttcgaccagttggtacaaaaataccagtcgcctgtcagacgcttcttcctgcatctgacttgcggtgacagcgaattgagtgacgacttggcacaggatacattcatcaaggcatataccaatctggcctctttccgtaacttgtcgagtttctccacatggctataccgtattgcttataatattttttatgattatattcgcagccggaaggagatggcagacctggataccagggaagtagacgccgtcaactgcaccgaacaagcgaacatagggcagacaatggatgtttatcagtcactcaaatcgctgaaggaagtggaacgaacctgcatcacgttgttttacatggaagatgtaagcatcgacaagattgcaggaataacgggaataccggcaggaacggtgaaaagccacctgtcgcgtggaaaagaaaaattagcaacgtatttaaaaagaaacggttatgacggaaatagataatgataaacttctgaaagatttcttcgcagaaaacaagcgggaaatagccgacaacggattcagccgccgcgtcatgcaccacttgcccgaccgcagtaaccggttggcacgcctctggactgtattcgtaatggcagtaggagccacgctcttcgtcaccctgggcggactggaagccgtatgggaaacactgaaagatgtactcatcggcatgatcaaccacggcgcaaccagcctcgatccgaaatcaatcatcattgcaacggtcgtcctactgttcatggccggacggaaagtagtatcaatggcataacaatgcttgtcacactctgtgccaagggcttggcacagttgtgacactgcactggcacagcagtgacaagccgttggcacaagtgtgacaacggcagggaacacagcagatcagatgtatcgaacgaatataattccccagatcaagagattcttgttcatttcttctgttaaagtataataaattagccctcctctcccgatagctccaaacatagatgttgtatctttgttactttgtaaactaaaatagcgagaagagttttgaaactacgtatatttcttttatttctgtttctgtctttattccgtgctcaggcagatgtcatcgacagtttgatgacgcattccagagactccatagctctgacaagtgactcccttgtattacgtttcttatcggagtcagggattcctatatccgacaataacaaggtcaggttactgaaaagcggacgagaaaaattcattgatttattcagcgccatccgcgacgccaaacaccacattcatctggaatacttcaatttccgcaatgactctatagccaatgcgcttttcgatctgctggccgaaaaggtgaaagaaggcgtggaagtacgggccatgtttgatgcgttcggcaactggtcgaacaataaaccgctcaagaagagacatctcaaaaaaatacgggagcagggaatcgagattgtcaagttcgacccgttcacctttccctacatcaatcatgcggcacaccgtgatcaccgcaaaatagccgtcatcgacggtgaagtcgcctatacgggaggaatgaacatcgccgactactacatcaacggactccccaaaatcggcacatggcgtgatatgcacatgagaatagaaggcgatgccgtcaatgacctgcaagaaatatttcttaccatatggaacaaggagactaaacaaaacattggcggcgaagcatacttccccaagcacaaggagcagtcggacagcaccaatgtagtcgtcgccatcgtagaccgcacaccgaagaaaaacagccgtatgctcagccatgcttatgccatgtcgatctattcggcacagaaaaacgtgcacatcgtcaacccgtattttgtgcccacatcctccatcaacaaggcgcttcaacgcaccatcgaacgaggtgtggatgtcacgattatggtttcttccgcctccgatattccgtttactccggacgccgccctctacaaacttcacaaactgatgaaaaggggagccaccgtctatatgtacaatggcggtttccatcattccaaaatcatgatggtcgacgatattttctgcacggtaggcaccgcaaacctgaacagccgcagcctccggtacgactacgagacgaacgctttcatcttcaacaaggaaattacaggcgaactgaacgacatgtttcagaacgatatagagcactgtacgcagctgacaccggaattctggaaaaagcgctcaccgtggaagaagttcgtcggatggtttgccaatttattcacgccatttttgtaattttgcatcgcaccaacttattggaaaattattcgctatgaaacaatatttagatttactcaatcgcgtattaactgaaggaactgagaaaagtgaccgtacaggaaccggaacgatcagtgtgttcgggcatcagatgcgtttcaacctcgacgagggtttcccgtgtctgaccaccaaaaaactgcatctgaaatcaatcatctacgagttactctggtttctgcaaggtgatacgaacgcgaaatatctgcaagaacacggtgtacgcatctggaacgaatgggcggacgaaaacggtgatttaggtcatatctatggctatcagtggcgttcgtggcccgactacgacggcggattcatcgaccagatcagcgaagcggtagagacgatcaagcacaatcccgactcccgacgtatcattgtcagcgcctggaatgtagccgatttaaagaatatgaatctgcctccctgccatgccttcttccagttttacgtggcagacggccggctgagcctgcaactttaccagcgcagcgcggatatatttctcggagtcccgttcaatatcgcatcgtatgcactgctgctacaaatgatggcgcaggtgacaggactgaaagcgggtgaatttatccatacacttggcgatgcccatatctatctgaaccacttggatcaagtcaaattgcagcttagccgcgaaccacgcgcattgcctcaaatgaaaattaatccggatgtgaagagtatctatgacttccagttcgaagacttcgaactggtgaactacgacccgcatccacatattgccggaatagtagcggtataaaaccatgagtaaaatatcaattattgctgccgtagaccgccgaatggcgatcggctttcagaataaactgcttttctggttgcccaacgacttgaaacgcttcaaggcattgactaccggaaacaccatcataatgggaagaaaaaccttcgaatcgctgccgaaaggtgcgctgcccaatcgcagaaacgttgtattatccacccgtccggatacggtatgtcccggtgcggaagtcttcccgtcgctggaagtcgccctgcaaagctgcaaggaagatgagcacgtctatataataggtggcgcaagcgtctaccgacaggcacttcctcttgccgacgaactttgtctgacggaaataaacgacgttgctcctgaagccgacgccttctttccggaagtatctccggctcaatggcacgaaaaaagcagagaagctcatcctgtggatgagaaacatctctgcccgtatgcttttgtagattacgtgaaacagtaagctattttattctgtacgattaatcttcgtcttcaatgtcgaccataatcggcatctgccgctttatggcttcatggaaagagatcaatgtctccgtacgcgccaaccccagaggttgcaatttatcatgtatgatactcagcaaatggtgattgttcttagcgtaaatcttgataaacatatcatatttaccagtagtgaaatgacattctactacttccggaatagcttccaaagctcttgttaccgaatcaaaggattccggatctttcagatatataccaatataagcacaagtttcatatcctatcttctcaggatcgatcacatattccgatcctttcaatattcccagattagtcaacttctgaatgcgctggtggatagccgccccggaaacgttacacgctcttgctacttccaaaaaaggaatacgcgcgttccctgctattaatttcagaatttgctcatctaaagcatctaattgatgatgtcccatttttgaatcaaattgttttaatcaatgaatctttcatgcaaagttagctatttttcggcaacaaatactatgatttattacttttatttgcaaatatcgaataagtcaacaatagtttgtacctttgtaaaaaacataaatatactatttatatgaaacaaatttgcagtattcttctttttttcctgatttcggcaggaagttatgcgcaaaactttgcagattattttcagaataagacgttacgggtggattatatcttcaccggaaacaataagcagcaagcgatctatctggacgagctatctcagcttccctcctgggcaggtcgtgaacatcatttgtccgaacttccactcgaaggcaatgggcagatcatcgtccgagatctcgccacccgacagtgtatctacaagacttccttttcttctctgtttcaggagtggctgtccaccgatgaagccaaggaaacagccaaaggcttcgaaaatacattcttgcttccctaccccaaacagccggcagagatagaaatcgtgctgttctctccccgcaaggaagtgatgaccagcttcaagcacattgtccgtccggacgatatcttgattcataaacggggaacatcacacgtcactccacaccggtatatgcttcaaagcggtaacgaaaaagagtgcatagatgtcgctatcctggcagaaggctacacggaaaaggaaatggacttattctatcaggatgcacagaaagcctgcgaaagcctgttttcacacgaaccgttccggtcgatgaaaaataagttcaacgtagtggctgtagccagtccgtcgattgacagcggagtcagtgttccccgcgaaaatcaatggaaacatacggccgttcattctcatttcgatactttttactcggaccgttacctgactacaagtcgggtgaaggccatccacaacgctttggccggcattccttatgagcatattattatccttgccaatacggatgtgtacggaggcggaggaatttacaactcatatacgctgactaccgctcatcatccgatgttcaagcctgtagtggtccatgaattcggacatagcttcggaggcttggcggatgagtatttttatgatgacgatgtaatgacggacacgtatccgctggatgtagagccgtgggaacagaacatcagtacacgagtaaattttgcctcaaaatgggaagatatgcttgcaccgaatacgcctgtccccacacctgtagcacaacatcaaaactatccggtaggtgtatatgaaggcggcggttactcagccaaaggtatttatcggccggcattcaattgtcgcatgaaaacaaacgaatatcctgagttctgcccggtatgccagcgtgctatccagcggattattgagttctatgtaccttaattaaaggcagatgcaggaattctttttcttttagaattcctgtctgactcctgacatagtaacatctcatagtatcatataactgatataatataacacccgatagagtataacatttggtatagcaataccgggtatagcaacaaaaaacaatattgtcaaacttaaaacccaaaccgtatgatcagatttcaaccgatcaccacatcggacgtacaacattacaaatttatggaagagcttctcgtcgaatcgtttccacccgaagaatatcgcgaactggaacatcttcgtgaatatacagaccggataggcaacttccataataatatcatttttgacgatgacctgcccattggctttatcacatattgggatttcgatgaattctattacgtagaacacttcgctaccaatcctgcattgcgcaacggaggctacgggaaacgcacattagagcatttatgtgagtttctgaaacgccccattgtactggaagtagaacgcccggtagaggacatggccaaacgccgtatcaacttctaccaacgccacgggtttacactgtgggaaaaagactattaccagccgccatataaagaaggagacgatttcctgcctatgtatctcatggtacacggcaatctggatgcagcaaaggattatgaaggaataagacataaactccatacaatcgtttacggagtcaaggaataaaggaacaaaggaatcggaagaaacatacttcggatagattttagatcatatccggcagacgaagttcagacataaagtctgcctctgccggagaataataaacagagaggctaaaagagaagctaaaaagaaagggcgtccaattgcttggacgcccttctctatatatcaaattaactaattatttctcaccacgtttagtagaagaatagttaatcttcaaagcgtaagattttctaagggcattcttcacgtctgtgataatacccattttagtcttttggtctactttcagagacacagtcatcttagcttggtcaccctcattcatacttgcacgttcctggaaaatgaagtcttgtacttcgccaacttcagcatagctgtcgttgagctgaatacgactttcagtacccattttcgcacgatattcctgagtcggttcacccacataaatgaatgttaccagcgatttcttctccagtttttcgagttcagtacctaccggaagtgtaaactgtacctttaatgttacctcgcgcattgttgttacaatcataaagaagaacaacaaagtaaagataaggtcaggcaacgaagaagtattcaatgccggcatttcacgtttaccagttttattaaattttcccattacttacttccttttttctccgtattttttaggttctgcctcagaaattctctgcggatagatttcacgaattgctttttgctgttcgtcgttcaattccgcataaggtctttgccatttctgaagggccagttcatctctcaattcattgtatgcagcaacaagttcgttctgcacgctgatgtatgcctgataagaagatccacggtcattctgcaaagaaattacatgcttgtcgttaacgagagtcgtaccgaaaaactccacattcttctgtgtcttttcaggcatgtgctctgcattgccggcattagcaataaattctttagctttttcccttagttgctcaacaccgatataatcattaccgcacatcaaagcatcatccttattcaggtatacctgcaaaatgttacgttctttgatcttatccgtattctgttgatcttgatcttcgggtggtggaggcaaaagtcttgccaaaccacggtccgtatccattgatgttgtaatcaagaagaagatcagcaacaagaaagcgatatccgccgtagaacttgagttaatatcaggaacttttctttttcctcttgccattgtaattacttattaaattgagtatcctcaattgattatgatatttttttctttatgccacttgcaatgattgcaacgattgttacaaacaacaagatgtagatggaataaaggaacatatcagttaatttcagccagaaaggaacgttgtcagtaccgtcataacctgggatattcatcggtgttccatcaccagcagcccaagcaatcactaaaacaacaaccaaaagaaccaaaccaagcaatgacttaattgcatttgcagggctatctttcaaagctgctccaaattggaatacagcagcaactactgtagcagcaacagccaaaccaaataacccataaatgagcatcagtaaggcatttgtgtttgccggttgccacatttcaggatctactcccgcaatgacatctgctccttgagcatcaccacccaggtagaaaagccccaggacaatgaggatgatggcaaacatcgcatacagtgcgtaatacgatactttatatgataacttactcatttcgaattattttttgtatttcagatcatatttgattaccatgtcaagcaaagagatagaagagtcttccatttcgcttgtaagagcttcaatcttagcaagtacgtagttgtagaatacctgaagaatcaaagcaacgatcaaaccgaaaatagttgtaatcaaggcaactttcataccacctgcaacaaccgtcggagagatatcacctacctgctggatcttatcaaatgcctgcaccataccgattacagtacccaagaatccgagtgacggagccatagcgataaacagtgtgatccaagaacatcctttttcaaggtaaccagcctgtacaccaccgtaagatactactgacttctcaactacatcgataccctggtcgattctcatcaaaccctggtagtagatagaagcaacaggacctctggtgttacgtgcgatgtctttagcagcttcaacatcacctttttccaaagcagcttcgatagatgccatgaatttttttgtgttgatttcagccaagctcaaatagatgatacgttcgatacagaatgccaaaccgattaccaaagcaatagcaaccaaactcatgaaagatgcagtaccttcaatgaatttaactttgatttctttgtgaataccaccttcttctgcagcaggagcagcggccggagcagcttgagcagcagcaggagcagcttgttgttcagtttgttctgctgcaggagcatcttgagcctgagcaagttgaattgagccaaatgtaaaggccccaatcacagcaacaattgcaaataactttttcattgtgtgtctaatttttaagattaattaattgattattatttattgtatttacttcacgtttcaacttttgttctgcggagagacggggattcgaaccccggatacacttttggcgtatacacgctttccaggcgtgcctcttcaaccactcgagcacctctccttatgagttttccgcattttcagctacaaatgtatccttttttttcttttcctaaagcattatcccttttttatcttaaataaatactgcaaattaatataatttaaaacctttggaaccttatttgaccattccgaacacttttagcgcattttcggaagtggcttgtgaaaggtgctccggggtggtccgataaatttctaccagtttcaggaacgtatcatgcacattcgcactttcattcctcttcccccgattgggggccggggtcagatacggtgaatccgtttcgagcacaatccgctccaaaggcactgtcagcaaggtatccggcagtgaggactttttaaaagtgaccactccgttgattcccaacatgaaaccgccaaattcaagcaaccgggccgcttcttccgcatttccggtgaaactatgaaaaataccggtcaaagcagtgtttttatagggctccattaccttatatatatagtcgaatgcctcccgcgaatgaaccacgatgggcaatttatattcgagcgcccattctatctgtttctcaaaaacgtacagttgttcgttcagaaaggttttatcccaatacaaatcaagcccaatttcgccaatggctacaaagttattgggtgcttccagacgctcccggacgattgacagttcctgacggtatgactcgttcaccgaggtaggatgcagtccgatcatcggataacagaaatccggataatccgcgcaaaccgacagcatgggttcaatcgtcgtactgtcaatgttgggcatataaatacgcgaaacacctgcctgacgtgcacgttccatcacctgcggcaggtcatcggaaaattcttctaaaaaaagatgggaatgagtatctattaacatgacaattcgctttcttcttttactttttcgttggagcggtagtaatataccagtccatagtcacgacattttgccaaccgggcttcattaggattcacttcctgaaacttcgcttccacctgattccagatatccagaatcagttcatctgcccggtcacgcatcgaagccagctcatccagactccggttggtggcagactggtaatttttctgacgttcgtagctatccagaaaaatatcataatgcacttttacgcgcgcaatagtcgggttataaatggggattcccccttgagaggttctccgctgctctccttcaatgatttttctcccccactctaccaaagctgcttcacttaataaatccggtaccacattcgcttccggaagatcataaagttctttatgcaccggtttgatttcatcgcgaagcaccgcgaggttgagcacttgaataaaatgggatatatacagccgtgccatccgcacattcgcctgatgcttgcgactggctctcgactggttgtcataacattgggtatagtaaatctgcgcagcttcaaacttcagcagaaaattacgggcttcaaataatgttttcagtgagatagccaagtcccgcacattatacacgtcacccttctcgaccgctgctttcagcgcccgtactctggcttgatccgtatttggcaatcgtctgtaaggcatttcccaccaactttactacatttcccgatacatcagtaatttcactaaattcttaagttctttcttcttctcttcggcaaccgcaactgcttcaaggctctccatagccagcgtataatattcgcgcattttgttttcacaaacgctacggatagtcaactgattatagatctccgtcactgccgctatcttttctgccggctgacagttctctgcattcagccagcggttcagttcttccagctgttctccgtttgcacgttccagtgctttgatcagcatatatgtcttcttattgcaaaggatgtctccaccgattttctttccgaacacttccggatcgccataaacatccagcaaatcatcctgtaactggaatgcaacccctatctgcataccaaaattataaagattctccgcatcaacagcagacgctcctgccagaatcgcgccgatcttcagacttgcggcaagcaatacagccgttttcagacgaatcatttcaatatattcgtcttccgccacatcgttgcgcgactcaaattccatatccaactgctgcccttcacaaatttccaacgcagtcagactaaacaaatcaatgacttctttcaaatgctcgggcgcacaaccggctacataccggaaagccagtatcagcatggtatcacccgacaaaatagctgtgttatcgttccaaaccttatgcacagtcggctttcctctgcgcatatccgaacgatccatcaaatcatcatgcagcaatgtatgattatgataaacttcgataccggtagcaggatcgtaaattgacgaaacatcttccttatacaagttatatgccatcagcatcaatacaggacgaatccgcttcccccccaaagaaaggatgtattcgattggttcgtagagtccttccggagtccgggttatctgattttcagataggtggttgtttattttatcaagtaattgagaagctgtaaacatgatgaaaacaaagattaatgaataaaaagaggctgcattcgcagcctcttaaatgtatgagtgttacaaattactgcaatctgaacattacaggaactgtaaatttaacgcgaaccggtttaccacgctgcatacctggtttccatttcggcatcgtgttgatcacacggagagcttctttatccagatacgggtctacactgcgtacaacttttgcatctacgatactaccgtctttgttaacaacgaactgtacgataacacgaccttgagtaccattttcctgtgcgatagtcggatatttgatatttttagccagatactgcatcaatgctgcctgtccacccgggaagtccggcatattttctacaacttcgaagatagtctgttcttccggctcttcctcaactacttgtaccggtacgtattttacttccactttaggtgtgttatcctcattaaggatggtagttgattcttcaatatctgcctggtcatcgacaatttccagcaattcggccaccttcggagcctcgggtggtggtggagtcgcttgttcaggggtttcggtaataggaatgatttcctcttcaaaaacaacatcagctacagcctggcttgtatcgattttcacgtcacgctgggtccattcgaacgccacgaacataaaagccaataccaccacgtaaccgatcagcagccatgtggatttctttccttccaggtctgccttgggtgattttttaacttccataattttgttaatataatgattaataaaaaaagtgtcttcctatgtgtctctgggcaaatatactacattttcagataaccgtccgtttcttcatatctttttatccggctttttaacttttttaattctttcatactcattcagttgcttttacagtcaaatttatggctgattttcaaaataagcgtatctttggcggacaaatataagaagcagataatatgaaaaagataacaatcgcaatcgacggtttttcctcctgcggaaaaagtacaatggccaaagatctcgcccgcgaagtaggatacatttatatagatagtggggcaatgtatcgcgcagtcaccttatatagtattgaaaatgggatatttaacggagacgttatcgatacggagaagctgaaagaagcaatccgggatatccggattactttccgcccaaatccggagacaggacgtccggacacctacctcaacggggtgaacgtagagaataaaattcgtacaatgggggtttcgtccaaagtcagccctatcagcgcactcgattttgtacgcgaagcgatggtagcacagcaacaggccatgggtaaagaaaaagggattgtgatggacggacgggacatcggaaccacggttttcccggatgcggaactgaaaatatttgttacggccacaccggagattcgtgccaaacgccgttttgacgaactaaaagcaaaaggccaggaaggcagcttcgaagaaattcttgagaacgtaaagcaacgggattacatcgaccagtatcgtgaagtgagtccattgcgcaaagcagatgacgctctgctgctcgacaattctaatctgagcatcgaacagcagaaggaatggctgtcggaacagttcggaaaagtagtaaaggaatagaggataaaaatcgagtgtatgattaaagtagagatagatgaaggttccggcttctgcttcggtgtggtcacagccatccacaaggcggaagaagaactggcaaaaggagaaaccctctattgcctgggagatattgtacacaacagccgggaggtagaaaggctgaaggcaatgggactaattacgatcaaccgtgatgagttcagacaattgcgcaatgccaaagtgttgcttcgcgcacatggagagccaccggagacttaccagatcgcccacaagaataatatcgaaatcatcgacgcaacctgtccggtcgtactgcggcttcaaaagcgcatcaaacaagagttccggaaggaagattttgaagaaaagcaaattgtgatctacggcaagaacggccatgcagaagtgctgggactggtagggcagaccggtggtcaagccattgtcatcgaaagtgcagaagaagccaaaaagctggatttcactaaaagcatccgccttttctcacagaccacaaagtctctggacgagtttcaggagattgtagaatacatcaaactccacatttcaccggatgccactttcgaatattacgatacaatctgccggcaggtagctaaccgtatgcccaatcttagggaatttgcggcaacgcatgatctgattttcttcgtcagcggaaagaagagttcgaacggaaaaatgctttttgaagaatgcctgaaagtaaacgccaactcacatctgattgataatgagaaagaaatcgatcccactttactccggaatgtggaatccatcggcgtatgtggagcgacttccacccccaaatggctgatggaaaaaatacatgaccatatccagctattgataaaagattaaaaagaaagatagaaaagacaatttgaatatttttaatggtttcgacacacgaaaaaaaacttatgaaacactgctttcaactttttgttgtacatttgccacgtcaaactaattaatgaaagattgttatgggaacagttaaatgtatcggtattttgacttcgggaggtgatgctccgggaatgaatgcggccatccgcgcagtaacacgtgcagctatctacaacggactacaagtaaaaggtatatatagaggatacaaaggtctggtgacaggcgaaatcaaagagttcaagagccagaacgtaagtaatatcatccaactgggtggaaccatcctgaaaacagcccgctgtaaggagttcaccacaccggaaggccgccagctggcttatgataatatgaaaagagaaggcattgatgctttggtgatcatcggtggtgacggttcgctgacaggcgcccgaatcttcgcacaggaattcgatgttccatgtatcggacttccgggaacgattgacaacgacctttacggcacagacaccactatcggatacgatacggcattgaacaccattctggatgcagtagataaaatccgtgacaccgccacttcacacgaacgtctgttctttgtagaggtgatggggcgtgatgccggattcctcgctctgaacggcgccattgcttcgggagccgaagcagccattattccggagttcagcacggaagtcgaccaactggaagaatttatcaagaacggattccgtaaatccaagaatagcagtattgtactggtagcggaaagcgaactgacaggcggtgccatgcactatgcggaacgtgtgaaaaacgaatacccgcaatacgatgtgcgtgtgacaatcttaggacacttgcagcgcggtggaagccctacagctcacgaccgcattctggcaagccgtttgggtgccgctgccatcgacgctatcatggaagaccagcgcaacgtaatgataggtatcgagcacgatgaaatcgtttatgtaccattcagcaaagctatcaagaatgataagccggtcaagagagatctggtcaatgtattgaaagagctttctatttaatagagactgccaacagaacagaagcttatttttataaaggcaatataaagaacggtggacgaattgagcttttcaattgttcaccgttcttatttcaattcatccattccatgatccatgccacagattccgggcagtccgcccccttgttttgctctatccgaatgaaaaatgaatgaaacgaatgaatcaaacagtagtatctccaatggagatactaccgactttttagtcaccccatttaagatactattgactaacatttggctcaaatccgtataaaaggaacaaacggcaacaaccgtttttttcggattgatcacagaattccaagtgatttctttttctccttctccggcagaagaaagaatggtcgttttttcacgttttttcttattcatcatttgcactgcatcaaatgaataacgatcagatgcacgtacgattacccaaatgattaaatcatgtgaaccactgcgccagcaattgctccgttatttcccacaactgttctttctgcacatgataaatgtagttgtccgacaactctttcctacgattgcctgcataaagctgtccgctgactccggccactgcctcatccagcaagaggccgacggcagtggaagcccctttcttcggcgtgcggataaaggggcggaaaaagatatccgtcagagggtcaaaccactggtgcatagtgatgatgtcggtagaaacaatgccgggatcggcggcattgacagtgattcctttttcacggaggcgttccgaaagttcgatcgtaaacagcatcaaagccagttttgtattgctgtaaacagggattcgccaaaaacttccctttcttccctgccggaagaaatcgggaaaatcgaggtgtccgatcgcatacgtgcaagaaaccatgtttacaatacgggctccgcgtgtcaatgccggaaggagtttccgggtaagcaggtacggccccagatagttcacactgaccgttcgttcaaagccgtcgtcggtgatgtgaagtccggtttccatcgttccagcgttattcatcagcagggaaacggggagatgacgctccacaatccgatcggcaaaagaagctgtcgatgccatagaagacagatcgactgccatgacttccatgtttacgtttcctgtctcgttcactagacgctgccgtatcggttccgctttggacggacgatagcaagccataataatatggtaaccggcttcggctacggcacgggttatttccgttcccatgccgccgtcggcaccggtgatgattgcccatttctcttcactcattgcttttccagtttttcaatctcccgttgcaggcagggaggcagtttttctttcaaatgttggtggcaggccatttcaatagtgtacatgcgcccgatgcagtagttgctgtgcccgcagttacagcgtgcctgctcttcccgcctcatccggttgacaaactccggttcgttgagcaacgcacgtgccatctggacggcatcgaagccggcatccaatacttcatctatcttttcacgggacaccagtccgcccacataaatcaacggagcttccggaagtgccgcccgaaatttcagtgcatcctccaggaaataggcttcccggaaaggaacggtcggaatcatccactttccaaacatccgaaccccgtatttcagccaccagcagtccatgtagtaagccatcgaacgaatcggcatcgctccccgcatgacgtacatcggggctttgctgacgaagcctccgctcagtaccaatgcgtgcgcgcccaatgccagcaggcgtttggccacttgcaaggtttcatcggtttccatgccgcctttgaagccatcgcgcatattcatttttacaaagaccgccatatcgcttcccgctgctgtcatcacctcgttcatcaccacttccataaagcgcatccgattttcgagcgagccgccgtattcgtctttccggtgattggtgtagggagacaggaactggctgatcagatatccgtgtccggcatgcacctccacggcgtcgaagccggcttcccgtgccaagtggacagcccgtccgtaggctctggccatctccggcaactcttctttcttcatgccacgtacgaatgtaggagaatagagattgaaaccggtagaggccgaaatgggagtggttccgcaaatctttttatgggacatatttccgcagtgccctatctggatgcctgctgccgcaccttccgtgtgtatagctccggtcacttcacgtaaaccggaaatgatttccggacgcagccacaactgacggtcgaaagaaagtccgctttgcgtcacggctgcataggctacagtcgtcatcccgactccgcccgcagccaccgagcggtggtaatcgagcagcatttgtgaaggggcgttaccgggacacatgctttcaaaagcggcagagcggatcgtacgattccgcagcgtcaatggaccgaaagtgacaggggtgaaaagtttagattccatagtacgctattttatgtcaatagataatttatttcaaatcaatagataaaaggaaatacacgtttgcgtccgcctacttccgagccaaattcttcacggtagcgatgccagattgcattggcacgggggacgagattggccactgtccaccagaagaatacaagtccggacagtgaacaggtcagtattgcccagcctgcccattcgatgatttcgcccagataattggcggaagtaacatagcggtacatccctttttggggcagataatgacgggtatcccccggtttgcgcaaatgacggatgatatagtccgaatgccagttcatcaacatacctgcaaagaaaagcagactgcccgcaataaaccatgcggaagtgaaccagccggaatgatacattccctcgggtgagagataaaatatccattcgccctgcatatagccgttcaatagattgaacaggattcccatcgacataattgccagcggcattttgctctttccggtcagtagcaggggaaagacgaaggcgcgctgaaaataatgaatctgaaagaagataaagaatgtcagtatgaccggatcaaaacgacgttccgagtgcatccacatccagcacatgaccagaaatacgggggcttccatcagtatccacgccagcttgttggaaatggcgactccccaggaggcagtgcgaaatatcccgtaaccggctttcacaaagtagagggcgatgaaaacaatcagagcgatcagactcatgacgcccaaaaatagattaaaggcagttatactcatcttgattttcttttgagattcacaaaaataacaaaaaaagaaaagaatggccacaaaaaactgaaagaactattcgtattgaccggacaggaaacttatgaatatcacaattatcttttttccatcccgtgttctctttcatatgacaccatgggcttttagcacatagttcactgatatccaaaggaatagaatgtataattcatcggttgtagaaacgcccttttaacgctacgttaaaagggcgtttctacctgccaggctgtgccctttctaccaacgataaatgccttagcctccatcggatgaaaaatatagcagccgcaaagtgttaaatgttaaatgaacatcggacgttcttcctgaaacaagtcactccagacgtacaaccgggtactaccaagatgtacaactggggattaccgagacgtacatgcagggattgccgagatgtacgtctgaggttagttattattgcataaaaggatttgttcttatcagcgtttcttgatggggatataagccagatcatcaagaacatttttataagccggacggataatgcgtttgccctcgaagttcagttcttcattgcggtgcgcacaccagccgacaatacgagccatggcaaacagcggagtgaaaatctcctgcggcaaaccaatcatctcatatacgaagcccgaatagaagtcgatattgctggaaaccgtctttccgttgttcttcacacgtccgaaagtagcgatggcacgctcttcaagcagttcgaggaaagcgaactcctcttcttttcctttctcacgggcaaggtcgcgagccagttctttcagcaacagcgcacgaggatcggaaatcgtataaacagcatgaccgataccgtaaatcaatccggtcttattatacacttccttattcagcatccgtgtgaaataggtatctatctcgtccacgctcttccagtccttgatgttctcctgcaagtgatggaacatatcggccacctggatattcgcgcctccgtgaagcgggcctttcaacgaaccgatacctgcggcgatggccgagtatgtatctgttccggtggaagaagtcacacgaaccgtgaaagtcgagttgttaccaccgccatgttctgcctgcaaaatcaatagcaagtcgagcgtacgggcatccagttccgtataatcttttttgagcatatagaggaaattctcggcaatagagagtttttcctgcggatgacggatatgcagggaacggccgaatgtagcatggcggagcatattataagcatacgcaatgatggtcgggaacttggagataagatcgatactctggcgcatcagattgtcgcgggaagtatcgtcggcatcgggatcgaaacgatacatttcgagtacgctgcgcgaaaggatattcatgatattatttccctccagctcgataatattcattttcgtcttctgctcgagcgccatattgtcattgatcagttcgcagaacgaagccagttcttccttgtccggcagacgaccggagagtagcagataagccacttcttcgaagccgaaacgtttttccttgatgatggcgtgggaaatgtcttccacatcatagcctcgatagaacaattttcccggaataggcttcagaccgccgccggggatacgttcgtaacccaccacattaccaatctttgtcagacctaccaatacaccggtgccgtcttcattacgtagtccacgcttcacgtcaaacttggggaacaattcattgtcaatccgggttgcctctttcatctcctcggagagcttgtaaatcaaatactctttcttcataatacttcgtttttaatcgttacatttacttttcgattctttccacaatttcgcgtgtgaaagcggtggtagacagggatgtacctcccggcataaagcgagccagatcgtgcgtggcacgggcatcgaggaaactctgttccagcgccttttcgataagcgcggccgcttctttccatcccagatattcaagcatcatcaccgccgaaagaatgatagaacaaggattcacgacatcctttccggcaatgttgggggcggttccatgagtcgcttcaaaaatggcgtgccccgtcttgtagttaatatttgctcccggagcaatgccgatgccgcctaccattgccgccaactggtcggaaacatagtctccgttcaggttcagcgtggcaatcacggaatactcttcgggaatcagtaatgtattttgcagaaaagcatcggcaatgcagtcctttatcaccagccggccgtctgccagcgcgtcgccaaactcacgttgcgccagctcatagccccatttcttgaaacctccttcggtgaacttcataatgtttcctttgtgcaccagtgtcacagaaggcagatgatggtcgagcgcatactggcaggcagcccgcacaagacgttccgtgccctcacgggaaacaggtttcaccccaaaagaagaggtctcggggaagcggactttcgtcactcccatctcgtttttcaggaattgatagaacttttcagcttcgggagtacctgcctcccactcgattcctgcatatatatcctccgtattttcacggaacacgcacatgttcactttttccggtgctttcaccggagaatgaacgccttgataccaacgaaccggacgcaaacaaacatataaatccaaggtttggcgcaaagctacgttcaaagaacggattccaccgccgacaggggtcgtcagcggacccttgatgccgatcagatattcttggaaagccttcatcgtttcatccggcagccaagagcctgtctcgttgaaagcgcgttcgcccgccagcacttctttccattcaatccgacgtttgccgccgtatgctttctgaacagccgcattcacaacggcttgcatcgacggggtcacttccgctcctactccgtctccggtaatataaggtacgacaggcacatcaggcaccgatagcgtaccatctttttgcatggttattttgttcatttctatcattttaattatctggcattcaaggcagaaccggcacgaaaccaggcaatctgctgttcgttgtatgtatgttgcgcttcaaaactctctttcgttccgtcttcgtgatggagaacgacggtcagattccgtcccggagcaaagtcgggcaagccgatgactgaaaggaggtcgtgctcctgtatcttgtcataatccgctttgtccgcaaaagtaagggcaagcatgccttgctttttcagattcgtttcgtggatacgggcgaagctcttggcgagaatcacacgcacattcaggaaacggggttccattgccgcgtgctcgcgactggagccttctccatagttttcttcggccacgacaatggaggggattccttcggatttatacattttggctgtgcccgaaacggttccgtaggtgtttgtcgaacggttccacacgttgttcgtttcgccattgaacgcattcacggctcccatcagcatattatccgaaatattctccaaatgtccgcggaagcgcagccacggtcccgccatcgaaatatggtcggtagtacacttgccctgcgccttaatcagcaggggcatattgagtatatcttgtccgtcccaagcggggaaaggagtcagcagttgcaggcgttgagaagccgggttgacgttgatcgctgttttcgtcccgccgggggcgatatagccttcattgccggaggtaaaacctctcaaggggagttcatctcctacgggttcggccagtttcactttctcgccgtcatggttcatcagtctgtctttcagcggattgaagcaaagatcaccggcaatggtcagtgccatcgtcagttcgggagaagcaacaaaggcgtatgtgttcggattgccgtccgcacgtttggcaaagttacggttgaaggatgtgacaatcgagttcttccgcgtcgggtcgtccgtatgacgtttccactgaccgatgcaaggaccgcaggcatttgccatgatcacggcgccgatctgcatgaagtcatccatcattccgtctctttcggcagtagcgcggatttgctcggaacccggattgatgatcaacggggaagccacactcagattcttttccttcacctgccttgcaagggatgcggcacggctgagatcttggtaagaagagttggtacacgaaccgatcagtccgacttccatcttacgcggatagccgttcagtaatactttttctgcaaattcagaaataggggtagcggcatccggtgtgaaagggccgttgatataaggttcgagcgtagacaaatcgatgtcgatgacacgatcgtagtacttttccggttcgtccgtcacctgttggtccgcacggagttcacagtccacggcttccgccagttccacgatacgatctctgccagtggctctcagataagtagccatgcgcccgtcgaacgggaaaagcgaagtggtagctcctacttccgcccccatattgcaaatggtcgctttgccggtagccgacagggaagccgttcccggtccgaaatattcgatgatggagttcgttcctccttttacggtcagaatccctgcaagtttcaggatgacatctttcggggaagtccagccgctcaattttccggtcaggcggacaccgataatccttggcattttcagttcccattccatacctgtcatcacgtctacggcatccgcaccgccgacaccgatggccaccatgcccaatcctccagcattcggagtgtgagagtcggtgcctaccatcattccaccggggaaagcgtaattttcgagcactacctggtgaatgattccggcgcccggcttccagaagccgatgccgtaacgagaggatacatcgcgcaaaaagtcgtaaacttcttcgtttgttttggttgccgtagcaatgtcctcctttgctcctttgtacgcctgtatcaagtggtcacagtgcacggtggagggaacagccactttttcttttcctgcattcatgaattgaagcaatgccatctgggcagtcgcgtcctgcatagcgacgcggtcgggacggaaatttacgtagtcttcaccccgtttgtagtttttcacatcgccctcattgaacaggtgggcatacagaatcttctcggctaacgtcaaagggcgtttcaaaacagcccgcacgtgttccacttttcctttataagcagaataaaaagcctctaacatagtcaaatcatacaccatattgcttttattttttttagtctatctataaaaataacgaacggcgttcgaggaatgtttaacaaaatgaaatatattttcgtctcaggaggaagatttactacctttgcatctattatgaataatcatccgaaaagtccaatcatcgaccttcagcaacagcaactcctgctacgcatggagtatgaacacgaaaaggaggaattcaagcggcagactgaaacaatgggtgtcgcccgcaaagtgaaacgtggtctgtgctggtatcccgcctctcccggtcgaagttactataattctctaaatcaacttgtaatagatattacacgcaccgaaaataaagaaatcgagcattccttcgaattcggtcgtcccgtctgctttttccgtcagtcatttgacgggaaagtgaattatatgaatttcattgcaacggtgagttatgcggacgatgaacggatggtggtcgtgcttcccagtgcaggcgcattgctggaactacaaacggaagaggtgctgggtgtacaactttatttcgatgaaacgtcctatcgtgccatgttcgaagcgctagaagacacgatccgcaccaaaggcaaccgccttgccgaactccgggacaccttgctgggaacacaaaagccgggattccgcgaattgtatcccgtccgtttcccgtggctgaacagcacgcaggagacagccgtaaacaaagtgttatgcacacgcgatgtcgccatcgtacacggccctccgggaaccggaaagactaccacgcttgtggaagccatttacgaaacgcttcaccgcgaaccgcaggtgctggtctgcgcccaaagtaatacggccgtggactggatttgtgagaaactggtggaccggggtgttcctgtgctccgcattggtaatcctacgcgtgttaatgataaaatgctctctttcacctacgaacgccgctttgagaatcatccgagctaccccgaactttggggaatccgaaaatcaatccgtgaaatgggcagccggatgcgtcgaggaagttactccgaaagggaaggaatgcgcagccggatgagccgcctccgcgaccgtgccaccgaactggaaatcctgatcaacgccgatcttttcgacagtgcccgtgtgattgcttctacgctggtcagcagcaatcaccgtttgctcaacggaaggcgtttccccaccttatttatcgatgaagccgcccaggcactcgaagccgcctgttggatcgccatccgaaaggccgaccgtgtgattcttgccggcgaccattgccagctccctcctacaatcaaatgtatcgaagccgcccgtggcggactggaccatactttaatggaaaaagtcgtgcagcaaaaaccttctgccgtctcgctgctcaaagtgcaataccggatgcacgaggcaatcatgcgctttccctccgaatggttctacaacggagaactggaagccgcaccggaagtgcgcaaccggggtatccttgacttcgacactcccatgaactggatagatacctcggaaatggacttccacgaagagtttgtaggcgagagcttcgggcgcatcaacaagcaggaagccaacttgttactgcaagaactggaagcctatatcagccggatcggcaaagcacgcatcctggacgagagcatcgactttggtctgatttcgccctacaaggcgcaagtgcaatacctgagaagtaaaatcagaggaagcagttttctccgccctttccgcagcctcatcacggtcaacacggtagacggctttcagggacaggaacgggatgtcgtctttatcagcctcgtccgggcgaacgaggacggacagatcggttttctgaatgatttaagacgaatgaacgtagccattacccgcgcccggatgaaacttgtgattttgggagatgcaaccactcttaccaagcatgcgttctaccggaaactgatacagtatatccggcaggaagcggtatcctcctgaatcatcgggataaaaaaagaagccccctttctcacgaaagaggactcccatttacaaacaaaacaaacaatgttattttcccactaaattctgttccaaaagctctgtcttaaattcaatttaacgcatactttttcctgctacagaataaaattctgcatcatatcaacgaatcactaatggaacacgaaatataaaaaggacttgaaatggtattacagctaccattcggtagagaataacttaaatatcttttaatgtaacattctgatatactattcattaaagaagaaatcatcttcatacgtatcgatcttctgtaagtaaaaagtttcttcattgcctattctgttttatttgttgccgtaaaggtaatcataaatgctctttttcacctatattatcagtatcttttaatctttttttctactttcatcctttttctattactcaaaagaccggtatctacatagaaaaggcgggaaaatacgcttttcccgccttttgaaaaacttatatagtataagtctgattaattattttccggacgaagtttacgaactgtcacggcagtctgccacatttcgctttcgcgcaatgctttcagttcttcttccagtttctcacgataatccggtttggagttagagtcgattgaaatctgtgcttcgttaccagtcttcacactgtgatacaacttttcaacgaccggtttgatagcatcgtggaaggggcccatccagtcgagagcaccacgttgagctgtagtagagcagttagcatacatccagtccataccgttctttgcaaacaacggcatcaatgactgagtcagctcttctacagtttcgttgaatgcttcggaaggagtgtgaccgttttcacgtaacacttcgtattgtgccagcaacagaccctggatagctcccatcaatgaaccacgttcgcctgtcaggtcggaagtagcttcgcggatgaaagttgtttcgaacaaataacctgaaccgataccgatacccaatgcgattgttctgtccatagcgttgcctgttgcatcctgatagatagcgtatgaagagttcaacccgcgaccttcaaggaacatagtacgcaaggatgtacccgaacctttaggagcaaccatgattacgtcgatatctgcaggaggaactacacctgtgcggtcactccatgtaatagcaaaaccatgagagaaataaagagcttttcctgcagtcaggtaaggcttgatagtaggccatacagacattactgctgcatcagacaacaggcacataatgatcgtacctttttcgcaagcttcttcaataccgaacaaagtttcacccggaacccatccgtcagcaaccgctttgtcatatgtctttccctggcgttgaccaacgattacattgaaaccgttatcacgaaggttcagagcctgtccgggaccttgtacgccataaccgattacagcgattgtttcatttttcaatacttcacgagctttttccaatggaaattcatcacggataactacattttctacagttccgccaaaattcaactgtgccattttttttgtttttttgttttgatgacttgcgccatctgttattaattgattttatactctatattattcaaatatcactttggaacggcatactacctcgctgccgtttttcttcacctctacatgaaactcgttttcactcacctcatcacagaagaaagagagttcatttccgaaataactttcagccacatacgccatttcaaaccggcggatacgtttcgtctgatacagttctatcggaaacaagtcaagtatgtgctcgatataacgaatactgtttacgtgtccgttaatatcgatatcactgtattttgccgtcagcgtcgcaacaggctgattgcttgtcaccttgatacgcgaaggcttttctatcgggcagggttcatcgcatatataatcgacgatgcttcctccatgcaatgccaacagatcggcaggcttacgagtattcagattgatcatcgcccatacggaacgggcatagccgatcttctttccatccttgtcaatgacggcaaagttacggtcggtaaagagacgatagacattctccacccatgtctgaaccgagaacttctcgtattggtaaggcatctcgtccagctcgatcgccagacgggaaagcacccatgtgtaattgtcctcgttcagcgtagcaataccaaatccacggtcgctggcatgaaaacctgcgcaattcagcagatgattccccagcacgcccatggtcaggcggccgttaaaatctacgtgaaacggctctgccacaaactgataagtccctattttattttcttcactcattactcctgttcctttttactttgcttatacttcgcttcctgtccgtccaggaactcattcacacgttcgaaacagctggtagtaatagccacacggcccgaacggacaaattgcagcacacatttcaaagcccgaagttcttcgtaaagggaagtaatctcttcactcatgccgttcttctcgacgatagagaataccggattcacctctacaatgcgggcattatatctgcggatcactttagatgcttccggagtctcctgaaaagcaggagtagataccttatataaggctatctcatggaaataaatctcgtcttccgtaaaatagtgcgcctgaatcacatcaatcttcttttcgatctgcttcaccaccttttcgatagtgtccttatcagtccacgctgtaatcgtatatttatgtactcctttaatggaagaagcagaaacgttcaaactctcgatgtttatttgccgacgggtaaatacagcggtcacctgattcagcaatccggctatattttcagaatgaactataatcgtatataatgtcttatcactcataactttctaaattaaggattaacattccagcaacatctgattgactgaaccgcccggaggggtcatcgggaggacattgccttcttctaccacacaggcttcgagcaggaacgccccgtctgtcgagagcatttcgtcgatggccgctttcaattcttcccgtgaaaagacacgtttggaaggaatatcgtaggcggaagcgattttcatgtaatccggattcagcatcggagtaaatgaataacggcgattaaagaacatagcctgccattggcgcacgttgccgagataattgttgttcaggcagataatcttcaccggagctttctgttccatgatcgtacccagttcctgaatgttcatttgcagtccgccgtcacccataaatacacatacagtgcggtcgggacggccgaaagtagctccgatagctgccggaaggccaaaacccatcgtgccaagtccacccgaagtaacgatactacgttccctggtatatttaaagtagcgggcagagatcatctgattctgacctacatctgtcaccaatatggcttcgtgacgggtcgcttcgcttaccgcacgcaccacttcgcccatactcagtgaatccgttgcaggatgaagttcgggacgaatgactttttcttcctctaccgcttcatattccttgaaactatcgacccactcggtgtgccggttctttttcagcagtccggtcacagcagccagcgtctttttgcagtcgcccaaaacggcaatgtctacctttacattcttatttacttccgccggatcaatgtcaaaatggatcactttcgcttgtttggcgtaagtagccagattaccggtcacacggtcgtcgaaacgcataccgacagcaatcagtacatcacatttgttagtattgatattcggtcccagatttccgtgcatacccagcattcctttattcaacggatggtcggtaggcaatgcggaaagtccgagcaaggtacaacctgcgggcatatccgccttttcgataaagatacgcagttcttcctgagcgcttcccagttccactccctgtcctaccaagacaagcgggcgttcggcgttattgatcagttcggcggcagcctttactgattcttcgtctgtatcgggaaccggaacatagctgcggataaactcctgctgcgtcggctcgtattttgttttttcaacctgcgcattcttggcaaagtcgagtaccaccggaccgggacgaccactactggcaatgtagaaagcacgtgctatcgcccaggctacgtcttcggcacggcgaatctgatagctccatttagcgattggctgagtgatacctacgagatcgacttcctgaaaagcgtctgttccaagaaagcctgttcccacctgtcctgcaatgacaacgataggcgtactgtctatcatcgcatctgcaatacctgtgatcgtattggttgctccggggccgcttgtcaccaagcaaacaccgactttacccgatacacgggcgtagccttgtgccgcatgggcagctccctgttcatggcgaaccaagatatggttcaatgtattttgatggtcgtacagggcatcgaacgtaggcatgatggaaccgccgggataaccgaaaatggtagtcactccctgatgttccagagagcgcatcattgcctctgcgcctgttattaagtccttactcatagttctttaatggataatggatgattcataatggataatgaagtggatcagtctattaatctcactgctcccttatcggcagagcttaccatgctggcgtatgctttcaggctcttcggcacgtaacggtcacgggtgacgggagtcatcgggcgggcagccagttcttcatctgttagtcgcacgttaatcgttcgggcaggaatgtcgatttcgatgatatctccatctactatttttcctatattacctccggcagcggcttcgggagaaacgtgtccgatactcaatccggaagttccaccactgaaacgtccgtcggtaatcaaggcacattctttgccgaggtgacgggatttgatataagaagtcgggtaaagcatttcctgcataccgggaccgcccttcggaccttcgtgcgtgatgacgacaacgtcgccgctgacgactcggcctccgaggatgccttcacaggctgcttcttgtgagtcgaatactttggcaggtccggtaaacttccagatgctttcgtctacacccgccgtttttactacgcaaccgtcctgagcgatatttcctttcagtaccgccaggcctccgtccttgctataggcgtgctccagatcacggatacatccgttcgcgcgatctttatctaattcctgataataagctccctgagaaccaagtacgagattgaatctgtttcctgccgcacttgaatatttgctcattgctttttccgtaacgttcgggctggtaattgaatattgatcgatcgcttccgccagcgacatgccatccacacggagaacggaagtatcaatcagaccgccttttgccaactctgccaggatagcaatgatgccacccgcacggttaacgtcctgaatatgatatttttgagtattcggagcgactttacacaggcagggtgtcttgcgtgacagcatatcgatgtcgtccatcttgaaatcgactcctgcctcatgtgccacggccaacaggtgaagcaccgtattggtagaaccgcccatcgcaatatccagcgtcatggcattgaggaatgcctgacgggtagctatactgcggggaagtacactttcgtcaccttcttcataatatttcattgcattttccacaatcagtttggcagcatcttcaaacagtttcgtacgattttcgtgcgtagccacgattgtgccgtttcccggaagagccaagccgatagcttcattcagacagttcatcgagtttgccgtaaacattccagaacaacatccgcaggtaggacaggcattctgttcgatattcgctacttcctgatcgcttacactgtcgtccgccgatttaatcatggcatcgatcaagtccagatgctgaccgttccactctccggcttccatcggtccgccggatacaaatacggtagggatattcaggcgcatggcagccatcagcatccctggggtaatcttatcgcagttgctgatacataccattgcatccaccttgtgcgcattgaccatatattctacgctgtccgctatgatatcacgggaaggaagcgagtaaagcattccgtcatgtcccatagcgataccgtcatcaatagcaatcgtattaaattccgcagcgaagcatcccagcttctcaatttccgccttcaccaactgcccgatttcatgcaggtgcacgtgtcccggaacaaattgtgtaaacgaattgacgatagcgataatgggttttcccatctgatttttcttcatgccgttggctgcccataatgcgcgggctcccgccatgcgacggccttgtgtactaaacgaactgcgtaattgctttttcatttcaatctatcttttaattaaagagcctccctcacatcagtgagaaaggctccaaattctatcttttatggtacgaatacatacacaaaacctttctcacgctcttgatggcaccaccacgacgcgaataatatgcagaactgctaggttaatagatgtatgtaatatattcatatcttcttttctttattttcgtgctgcaaaggtaagggcttttttattatctccaaacaaatcgaagaaaaaaatcactaaaaagcgaataatcgtaagaaaagaacggtaataaacctaaattttatcacttaaaggttgaatttgcaactatcagttagtagagaatgactgtccatttctgacaaaagcgcttaataatctgaaatttactccgtatgcacccggtagcaagcaaattattcgtatctttgtccaccctaaataagggatttattaattagaaactataaatatcagatggaaacagtagaaaacaagtacatcaccgttgcatataagctatatacagtggaagatggtgaaaaagaattgttcgaagaaacaaatgcagaacatccttttcagttcatttcaggattaggcacaacgctcgaaagcttcgagaaccagataacagctctttctaagggtgataaattcgattttaccattccggcagatgaagcttacggagcctacgatgagcaacatgtatttgatcttcctaaaaatatctttgaaatagatggcaagttcgacagcgaacgcgtaacagaaggcagcattgtacctttgatgaccggagacggtcaacgcgtaaacgccagcgtcgtagaaatcaaaccggatgtagtagtagttgaccttaaccacccattggcaggcgctgacctgatctttgaaggtgaagtaatcgaaagccgtcctgctaccaacgaagaaattcaggaactggtgaagatgatgagcggtgaaggttgcggttgcggatgcgacagctgcggcagcgactgtggcgatgactgcggttgcgaaggcggacactgccactaattttaagtaataggtaataagtattaagtattaattccatgcggatataggcggaagttaatacttaatactttttttatgccgttattccagctattacctattacttattacttgttacttattacttgttacttgttacttattacctgttaacatcctcctttgtgcgtcatgatatcaagcaccatcttatccgtttcgttcatggcttgcgagccgattcttgtcaggttacggatgctttgatcgacatcttcgtcaataatgccttctacagaagtcacacaacggtcctccattgccatcatagcagataatacggctgttgagactccggttgttactttgagtgcgcagctcggttttgcaccgtcgcaaatcattcccgtcaggttggcaatcatgttttgaacggcaaaggctacctgattatagtttccacccatcagccaggtgattccgcaactggaacccgtggcagctactacacagccacacaaggcagagagacgtcccagactttgtttaatatagattacagtgagatgactcagcattaaggcgcggatcagttcctcttcggttttaccattttcttcggcaaatacgacaacgggaagtgtggcggatatgccctgattgccactgccggagttactcatgacgggaatcattgcaccggccattctggcgtcgcaagcggcggaagtataagatagtatatgagagaatacgctgtcacccatcactttatgttcatacgttccacggagcatcttacctaaagaatgcccataattgcctttaaaggcttgctcggcggctgctttgttcagacgtgccgtatcgagaataaaacggatttcatccagaggggatgtcagggcaaaatcatagactttgcgcagattcagttccagtgaagcgtcttcttcctcttcattggcagtctgttgcttgtcaagcagtactttttcatccgtagctatatagacaaaggtagtatgtccgccggcaatcacagccgtcgctttttggctgccggctgtgcagattacttcgatgtacagtttttccgtaatatcttctttgagagaaatacagattcgcttctctgcgataaacagtttgccttgttctactgcctccggtgtgcagtctctcaacacttccagttgatattccgatcggccgatcaacgctcccaaggctacagctataggaagtccgaccatatctgtgccggggataccgactcccattgcattctttaatatattggcactcaataacacttcaatcttttccggtttcattcctaatgtttcggcagctttagctacacaaagcgctaccgcaatgggttccgtacaccctatcgccggaatcacctcttttttgatcaagtctattatctgttttctttccgattcaatcataccctataaggctttagtttccacaaaagtagaaaattcttttttatcaaacatccattagtgaacaaataaaattgcagattgttataaaatcttccaagaaccgaactttaacagttagaatagtagaaaaatgaaagcaaaacacggtattctttatttgctgctagccattttctcttcttcttgcattcgcgaagaagctcccaatgcagaggcagacatactcagttgcagattgccgggagtagtcatgacaacgagtccgattatcactaataattccatcaatatatttgtaggaccgggaacggacatttcatcccttgcacccgaatttacattgactccgggagccactatcgatcctcccagtgggacggctagagatttccattcgcctcagcaatataccgttacggctgccgatggcttttggaagaagaagtacaccgtatccgttattgatacggaacttgctactatttacaattttgaggatacgctcggcggacagaaatactacatcttcgtagaacgggaaggagaaaaagtggtgatggaatgggccagcggaaacgcaggttatgcaatgaccggagttcccaagacagccgacaactatccgacttttcagtttgcaaacggaaaaaccggaaaatgcctgtccttagtaacccgcagtaccggattcttcggtagcattatgggaatgcctatcgcagccgggaacctgtttatcggctcttttgatgtaggaaatgcaatgagcaatccactgaaagcgaccaaattcggtctgcctttccggcatataccaacttatctggcaggctattacaagtataaagccggagatcagtttacagaaggcggcaaacccgtcagtggcaaacgggatatatgcgatatttatgccatcatgtatgaaaccagtgaatctgtgccgactcttgacggaacgaatgctttcaccagtcccaacctggtttcaatagcacgcattgacgacgccaaagagacggacgagtggacatactttaaacttcccttccatatgttatccggaaaatacatagataaagagaagctaacagcaggaaagtataatgtagctatcgtattcacttccagcctggaaggagatcattttaacggagctatcggaagtacattgttgattgatgaagtcgaactaatctatcgctcggaagactgattccattcgaccaacgatctgatagcagctatggaaggcagaacagagcaactataatgaaataactaatgatttaataataatgaaaagatgaaaatccattcctatatattcagtttactcgcctgtctggtgatagccctccccggctattcacaggttgacagaaacgaaacacttattcgctccgctcttcacggactggaatatgaaatcaaagcagggttcagcatcggcggtacagccccgctcccgctgcctgtcgaaatccgttcgattgacggctacaacccaacgctggctatcagcatcggaggagaagtaaccaaatggtttgccgttcaaaacaagctcggagtcattgtagggctgcggctggagaataaagccatgacaacggaagccaccgtcaaaaactataatatggaaatcctcggacagggaggagaaagaatcagcggtgtctggacaggaggagtcaaaaccaaagtccacacttccggactgacaattcctctaatggctacttacaagttgagcaaccgttggaatattaaagccggaccttatttttcgtatctgctttcaagagaattttcggggcacgtatatgaaggatacctgcgtgaaggcgaccccgtaggccccaaagtcgaatttacggatggtaaaatcgctacttatgacttctcggacgacctgagacattttcagtggggcctgcaaataggagccggatggagagcattcaaacatctcaatatatatgcagacctcacctggggattgaatgatatcttcagaaatgactttcagaccattacttttgctatgtatccgatctacttgaatatcggattcggatatgctttctagctgaccaaagacggattaatccttaccggattcctccacctgcttcacaccggagaaagcaactttcacggtctgcttcaatgcaggtacttttacctgaatattcattgtagcatttccactttgcaccgttccttctatactggtggcacaggtacccaaagcagcggcatccccctgaaaagtaaggtcttgctgtccggtgaaagtcgaagcgtccgtttcctttttcactgcacacttgtctattacgatatcgccgaactttaatatgtttccgtttataaacagttcaaattccttcagttccatctttacttccgtatcactgacctgagagaaagtaataaacttcggaagtccgtcggcaatcacaacttcctggtcggagccatcgggcagcattgaaatatcgagatttccccaatacgttcccaccacatcgggagcagtcaccacagcctcttcttccggaggagtcgtttcatcattgaccgtattatcatcatcactgctacaagccgtcaaaagagagacagagcatatcaatgcccacaaatacaatagattctttttcataattttcgggtttagttattaaataatcgtcatttataaactaaaaagaggaaaaaaggttcaatttgcttccttttccgaagatattttgaattcacaaccttcttatcgaaaactttgttatatttgcatagagtaattttaaaaaagccacaactatgtttaattcatttggcaacatctttcggctcaccagcttcggcgagtctcatggaaaaggagttgggggagtaattgacggatttcctgccggaatcacaatcgacgaagaatttgtacaacaagaactaaatcgacgccgtccgggacaatccatcctcaccacaccacgcaaggaagcggataaagtggagtttctttcaggcatcttcgaaggcaaatcaaccggatgtcctatcggatttatcgtttggaacgagaatcaacattccaatgactacaataacctgaaagaggtataccgcccttcacacgcggattacacctacaaagtgaagtacggcatccgtgatcatcgcggcggcggacgttcttctgcccgcgagactatttcacgcgtagtagccggcgcattggctaaattagcccttcgccagttaggaatcagcatcacagcttatacatcgcaagtcggtgccatcaaattggaaggcacttattccgactatgatctcgacctgatcgaaacaaacgatgtacgttgtccggaccctgaaaaggcgaaggaaatggcagaccttatatataaggtaaaaggcgaaggcgataccatcggaggtacgctgacctgtgtcatcaaaggatgtcctatcggattggggcaacctgtgttcggcaaactgcacgccgccttgggcaacgccatgctcagtatcaatgccgccaaagccttcgaatatggagaaggattcaagggactgaagatgaaaggctccgagcagaacgacgtattcttcaacaacaacggacggattgaaacgcataccaaccactccggaggtattcagggaggaatcagtaacggacaggatatttacttccgtgtagtattcaaaccgattgctaccctgctgatggagcaggaaacggtgaacatcgacggcgtagatacgaca

SEQ ID NO: 4727 - DNA, 26223 bp, Unknown
  gut microbiota DNA sequence
agtatcaatatgtcaatctacccatgtgccaatacctgcactaaaaatctgtcaggctattggcacataggctaaataaccgccagtaaactattcattatgaacgaaattcaaaaatatatcgcagcgaacgaaccgaagattatggaggacctgttcagcctcatccgtattcccagtatcagcgccctgccggaacatcacgacgatatgctggcttgcgcccaacgctgggcacaactactgctcgaagccggagtggatgaagcattggtgatgccttccaagggtaacccgattgttttcgcacaaaagatcgttgacccgaatgccaaaacagtgttggtctacgcccactacgacgtaatgcctgccgaaccgctggaactgtggaaaagccagcccttcgaacccgaagtacgggacggatacatctgggcacgcggagcggatgatgacaaaggacaatcctttatccaagtcaaagccttcgaatatctcgtcaagaacgaactgctgaagaataacgtcaagtttatcttcgaaggagaagaggaaatcggctctcccagtctggaagccttctgcgaagagcataaggagctgttgaaagcagacgttatcctggtttcggacaccagcatgctgggcgccgaacttccatccctcaccaccggtctgcgcggactggcttactgggaaatagaagtgaccggaccgaaccgtgacctgcattcgggacacttcggaggcgcggtagccaatccgatcaatgtactttgcgaaataatcagcaaagtgacagataaagacggaagaatcaccgttcccggattctacgatgacgtagaagaagtgccgcaagcagaacgggaaatgatcgcccatattccgttcgatgagaagaaatacaaagaagccatcggagtgaaagaactcttcggagaaaagggatacagcacactggaacgtaacagttgccgcccgtctttcgatgtatgcggcatttggggaggatatacgggtgaaggctccaagacagtccttccctcgaaagcgtatgcgaaagtttcctgccgactggttgcacatcaggatcatcacaagatttctcagatgtttgcagattatatcttacaaatggctcccgacaccgtccaggtaaaagtaaccccgatgcacggaggacaggggtatgtctgcccgatttcccttcctgcctatcaggctgcggaaaaaggttttgagacagctttcggcaaaaaaccgctggcagtacgccgtggcggaagtattcctatcatttcgacattcgaacaagtattgggaactaaaaccgtattgatgggcttcggacttgaatcggacgcgatccattcgcccaacgaaaacttctcgctggacattttccggaaaggaatagaggcggtggttgagttccatcaggaatatgcgaaaagataaaggctgtccatagccgcacacaggacacgaagataaaagaagaacggtagacaagcggataaatcctttgcctaccgttcctttttattcaaaaaaagacatcttaccacataactaactatcaattacatcaccggagtttcgaaaaggaaggtaaatgattgactatccttcaaatccttcacggcatctcctgcgtaaatttctcctttggtcagggataacttcttcacccctgccttcggactaaaatcaatcttcttcaaatccaaccaaaacaggttcggagttaaagtagattcaaagtaatacactttattcttctgatcggaaacggaacgccagcgagtagaagaaatgtgaggcttctccggtgtattgattccaaacggaacggagacattgcgcatcacactcagcacactggggacggctatctttgcatcggcagtctgcggaatggcgtgaatgtagaaagaggcacgcacaaaacggtcgctcgaacggttcgttcccggcaacatctgtaatccgcccacttctttccagtaatcattgacagccaactgcaattcataacgcggagaattggtcatcacctgatattccttcccctcatggatactcagtttgccatccagatattcgatcactgccgtgttacccgtttcatcggtaatagccatgtgcaaagtagattccggtcccccgttcggcatacggggagcgtcaatgcggaaagtctcttttttcatttcatctaccgcttcacgcaccgttgcaaaattgtcaagtacatattgagtccagatactaattcccattgccggacgggtatctccgggaagtgaataaacagattccggcaggaaaagcaggcttgccaccagccctttttcattcattccgtcacaagtacctatatcatagcctgttgcgattacgcttccatatttggaagtccagtttactgttttttctttattgtgtcccgcacgctgcattccacgtggaaacacatagatatttgacataatgtcttctttccagtccatcgtgcgaccagtgaccaccattcggtccggccccagatatacggcacgcgtacatgctcccgccggctgtatgcccatcaaagagacggcagctaacaccaatgcaacacccgtaagttttttcttcatattacttccaaattaaatagttgatactcttatatctataataacaaatatacaacgtatattgcttgagagagagaaaaatttaagggaaaaaagggaatttattcagaaaaaatcttatccgctcttatttgagttaaaaaagcctgcggatggaaggaaacattacacattatttgcttttcaaatgggatttcattatttttgtacataacctatcataaaaactaaggagggcaaatgcgtatgagacaaaaagttagcatatcacagcttccaattcgtttgggaatctttcttttgctgtattttgttccgcaatcactctctgcgcaagaaaacaacgacagtacgcacatacttcgtaacggtgcatccataacgccggacgacgtactaaaacaggccaacattaacttgtttccagaaaagagcactacatattctttatattcacccggacagttggagcatataccccgcttttcactcaaaagggatatttccctaccttatcagaccaatccttccctactcttccgaggtgattacagtacgggcggggtattgcatcaattcgatcgtggagcactgttcggttccggaagtcagacaagtatggcaggcatcgggcgtttcaacagtgcttcactaggttatcagcatattttcaatgagcaattcgagttacaagtccgtgccaatgcgctgaaggtcaacatgtcccacatcaccggacaggctttcagcacttcgggcgccttcctttaccatccttccgaccgtgtcaccttgaaagtcttcggatcatacgacatcagaaactcttacggaatgagcacccatagctacggagctacgatgtccgtcgatatgtccgaccgctttgggatggaaatgggagtacagcgatactatgatgcgatgagcggacgttgggaaacggttcccgttatgattccttactaccatttcgataagttcactctgggtttggatgtgggcggtattatatatgagattctccgcaatgccgtttttgataaaaacagaggcataggcggtccatccggtccgacaatcggaccaccccggatgcatatacctatacggtaaacctccgttattacgaatttgttttcagatagtcattcacattcagcaatttatattcgggtgaacattcaaacagatagttcagcagattcatgtgtgccgcaccaaagatcacaagtatccgtttggcggattttggggtacgttgtatattcctgaatatcctcagattacggttgaaccatcttcctgattcgaaatcggctcctgtataatctcccttatcggattcgtatttgaagtgtccgataagataattgcccaggtctttcttgatttgtcggggatcattcagatgtatcagctggggaagtattcctttttgcttgaatattaactggtctttggaatataaagatgagtcaggagaatttacaaaactctcttcaaaatcctgatattgtttcgtgctatcgtcttccagcagttcttcgatacgggctgtttgtgtcccccgtgcatctgcacagtaaatctttgctttgcacatctttgcaatcctgaaaccaagttgctgcacttcactctttgacagtttatgatttccggcaaggtatgctttaaatagagaatcaaccttttgctgtccgcccagcgggtgttcaatgacgattgcatccggcttaaagttcgccagtttactcgctattaactctatttccttctgataaacaggcgacaagacattaatctgatcttcttcggatatttgttgcatatcgagattcggaaagtcaaagtgaaagacgcctagtgtcagtacttctgtccgctgggcatatccttttataaagaacataccggtcatgatgagaatgaatgctattttattcattgtatttatgatatgtttgaagctcaaagttagcaaactttttctaaatggcagatattaaattaatttaagtacaatcattgcagtcatttccattccgcatcgtcaaaattacaaagtaataaacatataggtgttatgataaaagagtgtacaaaacagatgataatccttctaaggcttggaaccaaagtttctgaggcttggaactaaagtttcatcagtttggaactaaagtttcatcagtttgaaactctagtttcaagcataggaaactttctgaaacacctgttaatcgaattagatcgaccatatgattggattaactcaaccgtatcggttgtctccgttcacctgttctttcaggtagtgatcaagcattttcagtcaacaaagtatgagttatcatccattaatatcctaaaaatcagaagatagcattaaaaaaatgattcaaaatacaatgtaacggtatgagagcaaccgtttgctctcatacttgccaccactcttgctaccatagccgaaactgcgatgaataaagggatacagatgaatagttagagcatgagagcaaaacagatgactttttcattgggagaaaaaacctagctgaattaacctatttccccccatccgacttctcttgttctgattgtaattcttttaattccatgagttccatactattctgaacatatattcgtatcaacaccaaacgggtgataacacgatttggacaagcagacttttcattcacgaactcatcaatgagaacattaaggaaacagagtgtacagttaagttcctgttttgacagtttatcaatactttcaatttgtccaaagctaggccagttgtctttaagaaaggcaaatttgtcggtggagttctgtaaatcagacttcatcaggcaggtaccgcaacaagtagaatcatccataattttctgttcttttatttgtgtgtgttcccgcatgccacaaaaaagaagggcgcggaaactattactacattaccctctcaaaggctctggtaagcccgtattcgaataataagcaatagtcccacgcccatgaggtatataacaaacttatatacaacaaagacgtggagaccggttacttattatctgcgaatactaaatttaccagatttatgagagcagataataaaaacgctatctccaaaataaaaaagcgtatctccattgcggagatacgctacaaatatagttatattttctgatattgaaactttagtgagtactatttcgccatctgattcagatgaaataccgccatatcgctgtttgttcctattctgaaaggaggcccccaaagagataatccgctggaaacatagatatgtgattgactccatttgcgatagccgtgactctgttcatatattctgtctgtaatcagactcataggccatatctgtccatgatgcgtatgtccgctgaattgcaggtctattcccaaagaatctgttttggccaggttgtagggttgatgatctaaaagaatgataggtttactacgatccgcttgctttaataaggtaggcagggaatgacgggaacggttggaacggtcgtcacgtccgatgatctgcacaccgttaggcaatgttactacggaatcacgcaatagttgtatgggagtatctttcaagaagcggacgctttcatcaataccgctgatgtattcatgatttcccggaaccatataaatgcccaagggagctttcagccgtgccagttcttccgccatattctccttatataatggggtaagactattgtctatcaaatctccaccgataagtataaggtcgggatgctgcgcatttatcatatctacatattctttcagcatagcttttcccgtaccataccctaaatggacgtcactcacggctacgatattgattccgttaccttctatcggcttatcaagggagacatcaatcttattgacctgcggatgacggtaattataataaccgtacagaagcagacagcaagtcgctcccaacgcataatagaaaccgtgattcagtgacggcacaaatatcttcgtcacatccgctatcaacaaagcaaaaatcatgtacagtgtaaacaccagccataccgaaccgatgtgaaacatggatttcgacaggatgacaggcatatctatatgacgggtcagcatagctatcaccaacgagaaagctaccagccaatagacgacagacaacagaatcttcatagccagcgagaagccggaaagcgtctgtaatgtacggataaagatataaacattaccacctacataggcaagcaggaatatcaggaaaaatattcgcataatcgttataaattaaaatggttatcaaatatattatcgcccttttccgttgtctggtagtgagtgtctgtatatctttgtgaggaataaaaaacaggtattatgttaccggatttgtgtaaagcattcgacaaaacttctacctattgttgacagcttgttccaattgcctcaaagccttctccagcgtagcacgcggacaggctacattcaaccgcataaacccttcaccttctttgccgaacgtcgttccttcattcaaagccaagtgggcatcttctacaaacaggcgattcagttcctcctgacttaatcccagctcacgacaatccaaaaagataaggtaggatgcttgcggacgaatcattctgatggcaggaatccgctctttcagataactttccgtgaagtcaatatttcctttgatataggcaatgacctgatccagccattcagtaccatgactgtaggctgctgctacgctgagataagcgaataagtgtccttcggagaactcgctcgcttccatatatacctgaaactgatgacgaagttcgtcattctcaataattgcatacgaacttgccagtccgggcatattaaacgctttgctcggagacataaagacaagggagttcatccgtgctttctccgaaatcaaagcaaaggtgggatgtttgtaaggaggcagggtcaagtcggcatgaatctcgtcagagattactaatgtaccgttctcatagcagatgtcggcaatctgcgacagttcttctttggtccatacacgtccgcccggattatggggattactcaggataagcagtttacatccctgcacatctttgcgaaaacggtcgaaatcaatatgatattgcccgtctttcaataccaacggactgtaaaccacttcacgttcgttcttctgtgtcacaagaaagaaaggatggtagacaggaggcatgaccatcaccttgtctcctttctccgtgaaacaatggatggcaaatgccagtccacggacaatgccgggagtaaacgtcagcatttcttcacgaatctcccatccatgccgttctttgagccagttaataatggattcggcccattctttgcaggcaaatgtataacccagcacttcgtgttccagacgtttcttcaaggcgtcgattacaaaaggggctgtgcggaaatccatatcagccacccacatcggaatcaagtcattacgcccccaacgacgctctacggcatcccattttacggagtccgtaccgttacggtttattatttcatcaaaattatagttcatactgcatgaggtttttatgttatgtgagacaaaagtagtacatttgtactcaattcaaaaaggaatttatgacgaaagctttattttttgatatagacggaacgctggttagtttcgaaacacaccgtatcccgtcttctaccattgaggcattggaagccgcccacgcaaaagggcttaaaatatttatcgctaccggacgcccgaaagccattatcaacaatctttccgaattgcaggaccggaacctgatcgatggatatataaccatgaacggagcctattgttttgtcggagaagaagtaatttacaaaagtgccatcccgcaggaagaagtaaaagcaatggctgctttctgcgaaaagaaaggagtcccctgcatcttcgtggaggagcataatatctctgtttgccaaccgaatgagatggtgaagaagatcttttatgacttcctgcatgtaaatgtcatcccgacagtttcctttgaagaagcaagcaataaggaagtgatccagatgactcccttcatcacggaggaagaagaaaaagaagtgcttccatccatcccgacttgcgaaataggccgctggtatccggcttttgcggatgtcacagccaaaggcgataccaaacagaaaggcatcgatgaaatcatccggcactttggcatcaagctggaagaaacgatgtccttcggcgacggaggaaacgatatcagcatgctccgccacgcagctatcggagtcgctatggggcaggccaaagaggatgtaaaagccgcagccgactatgtgacagcccccattgatgaggacggcatcagcaaggctatgaaacatttcgggattatctaattcatttatccggtcagcacatctgcttatccgtcactaactttatgagcgtagacactaataacgcagcttttcaggacgccctgaatcttattcagtatacccgccagtcggtttttctgaccggaaaagcgggtacaggtaaatctacattcctacgttatgtctgcgaacataccaagaagaaacatgtcgttctcgcacctaccggcatcgcagccatcaacgccggaggaagtacgatgcacagtttcttcaaactccccttctatccgttactgccggacgatccgaatttaagtctccagagaggacgcattcacgagttcttcaagtacaccaaaccgcaccggaagttactggaacagattgaactggtcatcatagacgaaatctctatggtacgggcggacctcattgatgccatcgaccgcatcttacgtgtatattcgcataacttacgggaacctttcggcggcaaacagttgttattggtaggcgatgttttccagctggaacctgtcgtgaagaatgacgagagggagattctgaaccgtgcctatcctactccatacttcttttcggcaagagtattcagccagatcgatctggtatccatcgaactccaaaaagtataccggcagactgattccgtctttgtcagcgttctcgaccatatccgtaccaacaccgccggagcagccgacctgcaactgctgaacacccgatacggaagccatatcgaagaatcggaagccgatatgtacatcacgcttgccacccgaagggatacggttgactcgatcaatgagaagaaactggccgagctggcaggagaaccgatcacctttgaaggaagcattgaaggggatttccccgaaagcagtctgccgacctcacaggaactcgttctgaaaccgggtgctcaaatcatctttatcaagaatgatttcgaccgccggtgggtaaacggtaccatcggagtgattgccggtatcgacgaggaagaagaaacgatatacgtcatcaccgatgacggcaaggaatgcgatgtaaaacgggaatcatggcgtaacatccgctatcgctacaacgaaaagacgaaagagattgaagaggaagtactaggcagcttcacccaatatcccatccggctggcctgggccattaccgtccacaagagtcaggggctgactttcagcagagtagtgattgacttcacgggaggtgtatttgccggcggacaggcgtatgtagcactcagccgttgtacctcactggatggcatccagctcaaaaaaccgatcaaccgggcggatatctttgtgcgtcccgaaatcgtaaactttgccggacggttcaacgaccggcaagccatcgacaaggctctgaaacaggcgcaggccgatgttcagtatgccgctgccgcacgtgctttcgacaaaggggatatggaggaatgtctggaacaatttttccgtgccattcactcccgttatgatatagagaaacctgttcctcgccgattaatccgccggaaactggggattatcaataccttgcaggagcagaacaaaaagctcaaagagcaaatgcgggaacagcaggaacgtctgcggcaatatgcccatgaatatctgttaatgggaaatgaatgtatcacccaagcccacgacgcccgtgccgccattgccaattatgacaaagcgctcagcctcgaccctaattatatagacgcctggatacgaaaaggaatcaccttgttcaacagcaaagagtattttgatgcggaaaactgtttcaataccgctgtcagccttcatcctgcaaactttaaagctgtgtacaaccgtggaaaactgcgtctgaaaatcgataatacagaaggggcaattgcagacctggacaaggctacaagtctgaaacccgagcatgccggcgcacacgagctcttcggagatgccctgttaagagtggggaaagaagtggaagccgccatacaatggagaattgccgaagaactcagaaagaaaaaatcataaataagttggtagtgtatcagaagtcttctgattgtgaaagttattgaatatcatcttacatcaaaaactttttattaactttgccttcgtatgtacgtcaaactcttaaaagaaaagcaaatgaaaaaaggtttgaaaatcgcagctatcgttgtaggggtaataatcattctgatgctcctccttcctttcgccttccaaggtaagatagcaggtattgtaaaaacagaaggcaacaagatgctcaatgcacaatttgatttcaagaaactcaacattagcctgttccgcaactttccgcaggcttctgttactctcgaagatttctggctgaaaggcgcgggagaattcgcaaacgatacccttgtacaagccggagaggtgactgccaccatcaatctgttctcccttttcggagacagcggttatgacatttccaaagtattcatagaagatacccgcctgcacgccatcgtcctgccggacggtcatgtcaactgggatatcatgaagcccgacacgacagacacgcaggaaacgcctgccacggaagaagagtcatctcctttcaaagtcaagctgcaacgtttcgtcatcaagaacatgaatttgatttatgacgaccagcaaggtaaaatgtatgccgacatccgtgatttcaacgccctttgtgccggtgacctgggcagtgaccgcactacgctgaaactggaagcggaaaccaaatcactgacttacaagatgaatggcattcctttccttgcaaacgccaacatctccgccaatatggacgtagacgccgatcttgccaacaacaagtatacactgaaagacaataccattcgcctcaacgccattcaggcaggtatcgacggttgggtggaactgaaagatcccgctatcgacatggatctcaaactcaacaccaatgatgtaggcttcaaggaaatactttctttgattcctgccatttacgcaacggaattctccagtctgaaaacagacggaaccgctactcttgccgcatcagccaaaggtacgctgcaaggagatactgtccccgcattcaacatcgatatgcaagtcaagaacgctatgttccgctatccggcattgcccgcaggagtcgatcaaatcaacattaatgccaacgtccggaatccgggaggaaatatagacctgaccaccatccaaatcaacccgtttagcttccgtctggcaggaaatcctttcagtctgactgcggacgtgaaaacaccggtcagcgaccccgatttcaaagctgaggcaaaaggtacgctcgacctgggtatgatcaaacaggtatatcctttgggagatatggaactgaacggaaccatcaacgccgatatgcaaatgtcaggacgcctttcttatatagagaaagaacagtacgacaacatgaaagcctccggaaccatcggtctgaccaatatgaaactgaaaatgcaggatatgccggatgtagacatcaagaaatcactcttcaccttcaccccgaaatatctgcaactgagcgaaacgacggtcaatatcggtaagaacgatattactgccgacagccgtttcgagaactatatcggctacgctctgaaaggtactacactgaaaggaacgctgaacattcattccaattatttcaatctgaatgatttcatgacagcatccgcagacagcgtggcaactaccgaagcagctgccacagactccacggcaattgccggcgtgatagaagttccgcgcaatatcgacttccagatggacgccaatctgaaacaggtgctgtttgacaagatgacattcaacaacatgaacggtaaacttgttgtcaaagacggaaaggtagatatgaagaatctttctatgggtactatgggcggcaacgtggtgatgaatggatattactctaccgccaatgcgaagaaaccggaaatgaaagccggattcaaactgtcggatatcagcttctcacaggcatacaaagaactggatatggttcagcaactggctcctatctttgagaatctgaaaggaaacttctccggcagcatcaatgtgctgaccgacctggacgcagccatgagcccggtactggaaacgatgcaaggagacggcagcttgtctacccgcgacctcagtctgagtggtgtgaaagcaatcgaccagatagccgacgccatcagccagccgagtctgaaagaaatgaaagtgaaagatatgacactggatttcaccatcaaagacggacgggtggaaaccaaaccgtttgatatcaaaatgggtgactataatctgaatctctccggtagcacaggacttgaccagaccatcgactactccggcaagatcaagcttccggcatccaccggcatttccaagctaatgacgctcgatctgaagatcggaggttcattcacttccccgaaagtcagtgtcgatacaaagagtatggccaatcaggcacttgaatccgtagccgacgaagcaatcagcaaactgggagaaaagctcggactggattctgccacgactgccaacaaagattccatcaaacagaaagtgacggaaaaagctacagagaaagcacttgatttcttaaagaagaaacttaaataagaaaaggagaagagagtatgcttctgaaactgtacgataaaaacaataacccgcaggacttgcaacgggtaaccgacatcctgaacgacggcggactgatcatctatcctacggatacgatgtacgccatcggatgccacgggctgaaagaacgtgctattgaacggatttgccggatcaaagatattgatccgcgcaaaaacaacctgtctatcatctgctacgatctaagcagtatcagcgagtatgccaaagtgggtaataatgagttcaagctcatgaagcataatctccccggcccgttcacgtttatcctgaatggcaccaaccggctgcccaaaatcttccgtaaccgaaaagaggtgggtatccgtatgccggacaacaatatcatccgtgaaatcgcccgcttactggatgctcctattatgaccaccacactgccatacgatgagcatgaagatctggaatatatgaccgatcccgaactgattgacgaaaagttcggtgatatcgtggatctggtaatcgacggaggaataggaggcatagaaccttctacagtagtgaagtgcacagaagatgaaccggaaattgtccgtcagggaaaaggctggctggaagggatttaatcccgaagactattaacttagagaatatataaatcaggcacggactacacggatttcacggttttaaaagattacatatctaaaaaacgtgttaatccgtgaaatccgtgcctgaatatttcttacttgatcaatgattccgggtccagatgacctgcttcgatatccttgaagtaacggtaagtacctactttcaactcttccgtagcagcatcgtcacaaacgataatacccttttcgtgcatctgcaaagcactgatagtccacatctgagtgatagaaccttctactgcatgatacaatgcgcgggccttattgtgaccatttacgataatcatcacttctttggcagaaagcacagtgcctacaccaacagtcagagctgtcttcggaactttgttaatatcgttgtcaaagaaacgggagttcgcaatgattgtatccgtagtcagcgttttctgacgggtacgggaagtcagtgaagagcccggttcgttgaatgcgatgtgtccgtctggaccaatgccacccatgaaaaggtcgatgccaccataagacttaatcttttcctcgtagcgtgcacattctgcatccaggtcgggagcattaccgttcaggatattcgtattttcctttttgatatcgatatggctgaagaagttattccacataaaagagtaatagctttccggatgttctttcggcaagcctacatattcatccatattgaatgttacgacgttctggaaagaaacgattcctttcttatttaaatcgatcaaagctttatacatacccagaggtgaagatcccgtaggacagcccaatacaaaaggtttttccggagttgggttggcagcttttatttttgcggcaacgtaatgtgcagcccactgagatacggactgatagtccggctgaataataagtctcataagtcgattgttttataggttagtaaataattgttcattctttatttagcggtcttttttcaagcggtccgccatcgcacgtgccaggttctcacactgggtataggtaatatcctgcatcgcctgtttcatctctaccggatcgcctaccagctcgaacttactcttttccgcaaattcagccatacgcttcacagcagctcctgcccaggtgaaggaaccgaagtatcccaaataacgtcctttgagttcgcgaaccagaatcttagacaataacgattccacttccgggaatatctgattactgtatgtcggagaaccgacaatcaatcctttataacggaaaatatctgcaaggatataagaaggatgactcttcgtcacattgtgcatcacaatattcctgattccctgtgctgagagttccgcagcaatagcttccgccatctgttccgtatttccatacatactgccatatacgataaccacaccttcgtccgcatcataacggctcagacggtcatagataccgatcaccctggaaatattctctgtccataccggtccgtgtgtagagcaaatggtagtgataggcagtcctcccaatttttgcagggctttctgtaccggactaccgtatttgccaacgatattggagtagtaacgcaccatttcaccccagtacttatctacattgatacgggtatccagaaatcctccgtctacagtgccaaagcatccgaatccgtcacctgagaaaaggattccgtccgtttcatcaaatgtcatcatcgtttcgggccagtgcaccatcggagtcatatagaaacgaagcatatgcttgcctaatgcaaggaagtctccgtctttcaccagatattgctcgccggtaacaccgtagaatccttcaatcataccgaaggtttgcttattgccgacaataataatatccggatagtgttgtttaatcaatcggatggagcccgaatgatccggttccatgtgatttataatcaaatagttaataggacgttcgccgattacttgcttgatcttgcgcaagtagacttcaaaataacagatatctacagtatccaccaacgccaccatttcatcatcaatcaaataagagttatacgaaactccatagggcaacggccataacgcctcaaaacggtgtttattacggtcatttactcccacatagtggacatttcctttaattcttgttttctgttccattcttcaactttaattaatttctgctcaccagctatgatcctctgaggacagagatttattctgtggtgaagttatcttccgcaaaaataactcttttttctgaatccctgtacttcttaccttgataagctcccctttctttcattcttttttgcaaacgagttacaaattcataattcttcagtccccagtccggagcaatcagcaattctttgggagactgcgaaacaaaacgttccaataccagatccgggcggagatactctacatagtcaatcaccaggtcaatatattcgtccacttccgtaaacagatgaaaaccttccggattctcttcgtattcatgcgccatgcgagtaccacgaatcaactgtaactgatgaattttgagtgtggacaaaggaagcgcggaaaggattcctgcctgctctaccattgtatcatgtgtctctcccggaagaccgaggatgacgtgcccgcccgtcagtatgccacaggcggcggtacgctgaacagcctctaccgtatccgcatacgtatgtccgcgattgatacgccgcaatgtctcatcactggcactctcaatgccatattccaccatcaggaatgtatggcggttcagttcttccagatactggagcagttcttccggcatacaatccggacgcgtaccgatcaccaatcctactaccccgtctacctgcaacgcctcttcatatttacgtttcagtccttccagttctgcataagtattggtatatgcctggaaatacgccagatatttcatctccggatatttatgggcaaagaaacatttcccctcctccagttgggtagcaatcgacttttccgtccggcaatagtccgggttgaaagtctggttattgcaatacgtacacccgccccatcccttcgtcccatcccgattaggacaagtaaaaccggcatttaatgatattttctgcactttgtaaggaaaatgttttcgcagaaaggttgggaaatcattatattgtatttgataagacatatctatttaattcatttgttatttgtgtggcaaacataagaaaaaacagcgagttacggaaagatgccccaaaatatcttcaatatattaaaaaaaacataaagtgcataagataaattaatatttattgcgaaagcagaaactatttagttagttttgtgtgattttaagcattgacgggaggatacttgtgaaagtcttgtgcaattattccccaattatgatttcatctcaccataccccatgcgactctcgtcaataaactatcctctttatgttctaaaaacagaatataaagaggatttttagcataagcaggcagacaagacagcgaaagggaggaaaaaataggcaaactttcgtattatccgttcaatgtagcgtccgggcttcttgttttccatccttttacttatttttgttctaacaaaaaacaccgatattatgaaacgcgcccggctccttcttatttctctttttaacttttgcatattagtggcccagcctacctatcagatcaagcattattccgtcaatgacggaatgtctcaaggaatagtacagacgatcatacaagacaaaaaaggatttctatggttcggcacctggaacgggctgaataaattcgacggatatacattcaaaaactataagacatcttacaaagacggctatattctgaataccaaccggatcagtcagatagcggaaacgaaatatggggatatctggtgccaagcctatgacggacgggtgtatatgttcgacaatcagacagagaagttcatcgacattttaggttcagtagcagaaacgatgataacgaataattatgccgaccatatttataccctttccaaaggaatctcatggatcacctttcaaaacgaatgtgccgccatccgcatagatgaccaactttgcaaacaggggaaaggaatcactctgtacagttccttcaaacaaaacttgaagggagacaagatatataccgttttcgaagattccgaaggagatgaatggatactgaccaacaaaggaatttctatcataggaaagaagcaggtagacagcgatttcccgttccaatatattaaagaagcggatggaattatttatctggtttcccaatcggacaaattggcctcttacaactttaagaccagacaattcaaattcatagagattccttatcatgtttcgatgattaacgaagtcaagaagtttgactccaatacacttttgctggctacagataacggactgattatttataagataaaagaaaaagaattccagttgattgatatacgcacatcaacgcaaccttccaacgtcgtacagtcagtttatcaagaccattacaaggaactatggatattcccccaaacgacaggagtgatccgttataatccatccaccgaggaaatgcagcatttgttcacaccggccgacgaagtgatcagatatgaacggaaaaataagaatgtgatctttgaagaccggcaacacacgttatgggttctccccccggaagggaatctgtcttattatgaccgtgaaaacaaagaactgaaacccatgctgaaggacagcaacaatccgaagtctgttttcagtccgctcgtccgcttttacacactggacaatcaaggcaactgctggctgaccagtacacgtggcatttacaaattgtccttctttccacatacctataatctggtgcatattgacaatggattcgagacccgcgcttttttatgcgacaatgaaaagaggctgtgggtttcttcgaaggcacagatgatcagagtgtaccaaccggacggacagttggaaggctatctgacgccacaaggaaaaataagcaaagataaacagagttttacaagcgtatattgctttcttgaagaccatgaaggcaatatctggataggaacaaaagaaaacggcatttatctgttaaagaaaaagtcgccggattcctattccgtacaacaatttactcatcaaccgaatatgccatacagcttgagtggcaacagtgtatattccatttttcaagatagccataaacgtatctggataggctgctatggcggaggaatcaatttgctaacctacaataaggacggtaagacagaatttatacacagcgataatgagttgaagaattacccgaccggctacgcttcgaaagtccgccacatatccaaagcgccgggcggtgtgctgttaataggaaccaccaacggattactgactttctccaatcaatttgagagaccggaagaaatcaagttttatcgtaattgttgcgagtcaggaataagtaccagcctgagcggaaatgatgtgatgcatacgtacaccgacaagcaaaaacgaacctatatagccagctttacgggaggcatcagccaaatcgtatccaagaacctgctcagcaacaagattgagttcaagacatatacaacggatgacggactggcttcggacttggtacaagccatgcaggaagatcaacaaggcaacttatggattctttcggaaaatgctatatccaaattcgacgctcaaagagagactttcgagaattacgggcttaactctctgcaccaggaatttagcttctcagaagcggcaccggtgatcaacgctcgcaatcaaatcgtattcggtacagacaagggattcattgagatttcttccaaagagatgcagaaaagttcctatgtccctcccattgtctttaccggtttgaaagtgcagggacaatcttctgtcatcgccattgacgatctggaagaattacgcctcaccccctctcagcgtaatgttactttccagtttgcggcactcgattatgtcgattccaaagaaatccgttacgcataccgactgaaaggactggaagaagagtggcacgacggcgacaagaaccgttctgccagctacatcaacttgccgaacggcaaatataaactgcaaatcaaatccaccaacagcgacggcgtatggatggacaatatccgcactttatccatcaacgtactgcccactttctgggagacgggctgggcatggctgctctacgttattctcttcgttctctttacgggcagtatcgtatatgtacttttttatatttatcggttgcgccaccaagtggatatcgagcaacaactatccaatatcaagctccgtttctttactgacatatctcatgaactccggacaccgctgactctgatcagcagcccggtcaatgaagttctggaaaatgaagacttatccgccacagcccgtgagcacttgactgtggtacaaaagaatgccgaacgtatgctacgtctcatgaatcagattctggacttccgtaagatacagaatcagaagatgaaagtactggtggagaagacagacctgattccacttcttgaaaaagtaatgatcaacttccgattgattgcagaagaaaagaagattaatttccggttggaaagcgaacttaaatcaatatatgcatggatagaccgcgataagtttgaaaagatattctttaatctgatatccaacgcattcaaatatacaccggctgagaaggcgattacaatagaagtgacaaaacagacagataaagtgacaatctctgtggtggatgaaggcatcggaattgaaccgactaaactgcgtactttgttccagcgcttcgaaacactggcacagcagaatatgctccaaccgtcttccggcatcggcctgtcattggtaaaagaaatggtcgacatgcatcacggtacaatcaaagtaacgagcgaaccagaagcaggaagccgtttcatggtaactctgcctcttcaaaaagaagtcttcgaacaagacagtcaggtggaatttattctgaatgacagtcaaagtccgactacccatccggacagcagcctccagactgagaaaagaccagaagcggaagacaaagaagatatggagaataatgcggctccggatacgtttactatattggtggttgaggacaatgaagaactgaaagctttcttaaaaaacatcttgtctgagaattatactgttatcaccgctccgaacggaaaagaaggattgcaacacgcagttgataatatccccgatcttatcatcagtgacgtaatgatgccggttatggacggcttggagatgattcggaaaatcaaagaaaacaataacatctgtcacattcccattattgtattatcggcaaaagcctctttggatgacaggattgccggactggagcaaggtatagatgactatatcacaaaacctttcagcgccacatatctgaaaacacgtatcgcttcactgctccgccaacgcaaatccttgcaggaaatctatatggccaaactgacggaagggaaagaaatagctgtcgcagaagctcttaccccgtcgcaaccgcagattactccctacgacgagcaattcatgcaaaaggtaatggagttcatagaagaacagatggataatgccgaactgaccatcgacgaatttgcagagcatctgatgctcagccgcaccatcttctatcggaaactgaagtccatcatcggactgactcctgtagacttcatacgtgaagtacgcatcaaacgtgcagcacagctaatagacagcggggaatataatttctcacaggtagcctatatgaccggtttcaatgacccgaagtatttcagtaaatgcttcaagaaggtagtaggtatcacgccttccgaatataaagagaagaataaataaaaaaagaagccgaccgtacgcattcattaatcaccataaccggctattttctttcgtagcacttaggtcagacaattgtagcacccaggtcagataactgaagcacctaggtaacacattcgtctcacctaggtgcaacgaaagaaaaacgactaaagacataaaagattttggctagcaggatacttatttatccctatgttccaataagttagcaacagttccgtatctgttaattccgctgatttccggaaagcagcatttttccggaatcctttttatattctttcccgttaataataatgcctgtagcattttttatctgtatgcccggagcctcgggatcctccactttgatattctccatattcacctgagaagcctgattgattacaatacctttcttggcattagttacagtcatgtttttgataaagatattcttaagaggcatttccggcagcccgttgaaatatactgcccgttccgcacctctgcaaagaacatttgaaatataaatgttcctgaaaacaggagtttcctcattcacatccggtatcggagtttccggaaagtcattgacagcataatacaaatccatcgtcagagcatcattggaaatatcaatcatgttaatattatctatgaaaatgttctccactacgccaccacgtccgcgggtactcttaaaccgcaaaccgacatctgtgcccacgaaagaacagcccgatacgtatacattccggacaccaccggacatttcactgccgattacaaatccgccatgcccatgcaaaaccgtattattcttaataatcacattctcacaaggttctccccgcctgcgtccatcctcatctttacccgatttcagacagatagcatcatcccccgcatcaaaaaaacaattagtgaccagtacgtttttacacgactccacatccagcgcatcgccattttgcgaataccagggattgaacaccttcacatcgttcaaagtcaaagattcgcaagacaaaggatggatacaccagcccggtgagttcttgaaagtcaccccttccagcagaatccgtttgctctttactatactcagcatgacagggcgcaaccagcttttcatgtaagtccactcttcatcggttatttctttctgcccgttattttgtccggtcataagtacagaggctttcaaagcacccgcatcaggataccatacttttccgttctcatccactttaccacccgaactcaccagatttttccattgccgttccgtcatcttgtctttcttgaccggacgccatctatctcctgccccatcgaaaacaccattgccggtgatggctatattttcagcattcattgccgaaatcggcgattggcagcgcttagtgtccagcccttcgaaagaagtgtcgataatgggatatagagatgtatcgctgctaaatacaatgagagcattcttctcggcatatagattaacgttactcaaaagtacgacgggccccgtcaaccataatccttcgggtatgataactttcccccctcctttggaacttaccgccttgattgcattgtttatcgcctctgtgttcaaggtcacaccatcgctgagtgcgccgaaatcacggatattaacctcataatcgggaaaggaaggttggctcacttcaggcattgaaaacggaagattcctgtatacgtctccctgttcttttgttccactttccggatttgaataaacctgatatgatataaatatcataacgcctgtcagcacaactctcaaatcctttttcaaaattccattcatctctttttaatttattttatcgggttcctattgataactacttacagaaatatccatatcttcattgatatgtctttcccatttcacaagcaaaagtaatggaagtctactccccctaagttcaattattgacagattaggagtaaaaaatagtcatttacctgttcgtctattaaaattgtactcaaacaaagtatatctccggaaaataattcataaaaaagccatagtagaaaagtattataaaattcttccttactatggcccttaatctaatcctgaaaacagttttaatctatggtcagagtttcatcatcttgccaatctatagttccggcagcaccattttggtctgtccagcctttggtctgtccgagccaggagttattgtccaaaatatcttttgacagacccattatataataattagatcgccatccgatcttaatccattcattgctgttgttcttatcaggttgcacattgggctccccgtactggaaattagactcccaaaaatcagccacttctttaagttgcttctggaaatcggcagattcagggtctgcaaatatattcttacgcagttccgacaacacatctttactgcctggagtatatccatcttttacatccacatatttagctgtacgatatctttcggtcaacggagttactcccaggaatgaacaggtattagtggtactcaactgcatagcttctccccgtcctccatcataaagcatccaacgccaaatatcccaatatcttttgccttcatatgccagttcgacctgacgttcacgcaaacaggcagccaacgccgatgcccggtcaaacacataagtatccaaaccgtaattattagtggaaggaatcccaacccgcgcacgcaatttcccgattgcctgtttacataaatcaatctgattggttgccgcataacactcggcaagattcaattgcaattccgcataacggaaatcatagatatgcactcccgaagcttcgtagttgttggcagaagcagtattgagtccactcatcttacgtacgaataccggactggttatatttactccttcactataggcaaagccgctggtagttgactccgaagttcgccaacgataagcccagaccgtatcattggtgacatctttatgtccccacttcaaaccattaaaggcaaatgtctggtagaaacgcggatcacggttttccataaagcgcaaactaccttcggtaacctgatgagcggcatcaggaagtgtaccgtcagccatagggaatacatcgatcaactcaataggagcaccttttccaccgcttcctccttgagaactcaaacggatattcttctcccagcgattattcttgtaacctaatgacgagttgctttccttagccaatagtcggacaactaatgtttctctgttagaatgttcattatcgtcatccgccaatattttactccagcttgcagcatccgtcacaccgtccaatccactggcagtaataccggaaatagcgttctgagtagcttccagggctttttgccaacgaaggttgcccggatcattccaattcttattaaagatggggctggcatagaataataacacacggctcttgtatgccaatgctccgccacgtgtgagacgtccgtaatcgtttgttccccattcatccggcagcaaagcggccgcatcggtcaagtctttcacaatctgttccacacattgggtcacagaggctcttggcagtcctgcatcggtcacctcagcattcagcactgttgtcacaataggtacgcaaccatacatacgaaccaaatcaaacaactgcatggcacgtagaaagagggcctgcccttttgccttatctttggtatcctgcgaaaccgaggaagcatcaatgtcacgaagcaggatattgcagttacgtatacgcgtataagcattgtt

SEQ ID NO: 4728 - DNA, 574 bp, Unknown
  gut microbiota DNA sequence
gctctacctgccagcgatttttataaagttcagcaacttgaagcgcagatatatgcatcgcattggttatgaatgtaaattctcgttcttgttcttcatcccaatatttaaccaatctaagtggctctggataatattgtttaggatagaatcctgtcagaaatacacttgcgtctgaaagcacattcttaggcagcctacgtttccattggatggatttgtacccgagattcttttttgctctgacaacaaagtaggcttcaatttgatgaattttatacagtattttgaagttgttataaccgcggtcaaagatgtaataagagcttggttcataaggaatttcaatcataactttagaatcgtgtacggatgcttccgtgatatgaaagaatgcaggaatctgtgtttccacatcatataatgtatgcactttgataccacctttctttttgcggaattttgcccaccaaaagactgaaaggcacaggtcaatagtagtcgaatcgaaagcataaacgttaccgccaagtttgaaaatatgattagcacacttttgtcgtgcttcgctaac

SEQ ID NO: 4729 - DNA, 4103 bp, Unknown
  gut microbiota DNA sequence
aaacagcttctgatttagggtaacccaaagatgaagtgtatttattaccaaacgagtaattttacaatctgacattaacagtcttaatttctaataccaaataaataaaaacatgaaaaaagaaacccccatctctttacgacatctcaggcgtattaccgccattttattcttatgtccgatttccctttcttccatacaggcatccgcagcatcggatcagagtgacgtttcttcggcatccgtccatcaggaacagactttgggaatccttcgtgcagaaaaaataaacccgacgacggttgatgtactgtttgcgaaccagcaacggatgactatcgacttttacggagagaatattttccgtgtctttcaggacaattccggaggcattatccgtgaccccgaagcgaaacctgaagcacagatacttgtagaccagcctcgacgcaaggtttccggactgtcagtggacgagaaagagggttatataaccctcactaccgcccaagtacggattgaactgaataagcagaccggactgatgaaagtctttaatccgttgaccggcaaatgtgtgatcgaagaagtcgctccggtgatattcggtcctaaagaagtgaccgtaaccttgaaggagaatcccgaagaatacttctacggaggcggtgtgcaaaacggacgtttttctcataaaggcaaagtcattgccatcgaaaatcagaatagctggacggatggcggagtggcctcccctgcccctttctactggtctaccaatggttacggaatgatgtggtacacattccggaaaggtgaatacgattttggagcaacagagaaaaacatagtgaaactgtctcacaattcttcttaccttgatattttctatatggtcaacgacggagccgtttccctgttgaatgatttctatcagttgacgggaaaccccgttttgttgcccaaattcggtttttacgaagggcatcttaatgcctacaatcgtgactactggaaggaagacgagaaaggaatcctctttgaagacggaaagcgatataaagaaagccagaaagacaatggcggcatcaaagagtctctgaatggtgaaaagaataattaccagttctcggcacgtgccgttatcgaccgttacaagaatcatgatatgcctctcggatggttacttccgaacgacggttacggagccggatacggacagacggaaacactggacggcaacatcgccaatctgaaaagcctgggagactacgcccgtaagaacggtgtggaaataggcctctggacacagtcggacctgcacccgaaggagggtgtaagtgccttgttgcagcgtgatatcgtgaaagaagtccgtgatgccggtgtgcgtgtactcaaaaccgatgtggcatgggtaggagccggctattccttcggattgaacggagtggcggacgtaggacatattatgccttattatggcaatgatgcccgtccctttatcatttcattggacggatgggcaggcacacagcgctatgccggcatctggtcgggcgaccagaccggaggcgaatgggaatatatccgttttcatatccctacttatataggttccggtctgtccggccagccgaatatctgctcggatatggacggaatctttggtggaaagaatgcggcagtcaatatacgtgatttccaatggaaaacatttacccccatgcagttgaatatggatggctggggcgccaacgaaaagtacccccatgctttaggcgaaccagctacatccattaaccgtatgtatctcaaactgaaatcggaactgatgccttacacgtatagctttgcccgtgaagcggtcgatggtatgcctctcatccgtgccatgttcctcgactatccgaatgaatatacctacggaacggctacccgctaccaatatatgtatggtaccgactttctcgtagcccctgtctatcagaatacgaaggctgataaagaaggcaatgatatccgcaatggaatttatctgcccgaaggcacttggatagattatttcagcggagagaaatacgaaggcaaccgtattctcagcaacttcgatactccggtctggaagttacccgtattcgtaaagaacggcgctattattccgatgacacaacctaacaataatgtcagcgaaatagacccctcacttcgcatctatgaattttatccgaaccgccatactgcaaccgtagaatatgacgacgacggtgtgacggaagcctaccgtcaggagaaatcggtatctaccctgatcgaatcgaacgtagacgcaaagaaccgtgtgactatcaccattcatcccacagccggaagtttcgacggttttgtaaaagataaaaagacggaactgcgcatcaacgtcacggagaaaccaaaaaaactgactgcaagaatcaacaacaagaaagtaaaactgacggaagtaagcacggcagcggaacttctgaatggagaaaacgtattctggtacgaagaaacccccaatctgaataagtttgcaaccaaaggaagtgaatttgagaaagtggttatcacaaaaaatccgctgttgcacatcaaactgggcagcaccgacatcaccgccaatcgtatcgaactggacgtggaaggtttccgctttgagccggccgaccgtaacttggtaagcaccggaaccctgtctgcaccgcaaaacgctcaggtaagcgagcagaacagagaagcatataccctgcaaccgacttgggacaaagtacccaatgccgattactatgagattgaatttaacggaatgctttatacgattatccgggatactcacttactgtttgaagatctgaaagcggatactccttacgcattcaaagtgcgtgctgtcaacaaagacggtgtgtccgaatgggcagagattcaggtgaaaacgaagactaatccgctggaatttgctattcgtggcattgaaggcgaatcgactaccgcatcgcagggaggattcggtgtagaccgattgttcaacttctccgaatcgggagatacatggcacacgaagtatagcgttaactccataccattagatttgattatcgacctcaaaacagttaaccaactggataagttccattatctgccccgtgcggatgccggcaacggtacactgctgaaaggaacggtatcttacagtatggacaaagaaaactggacggaagccggagcattcgaatggcagcggaacggtgatgtaaaagtatttactttcacagagcgtccaaatgcacgttacatcaaactgaacgttacggcaggtgtaggaaactacggttccggtcgtgagatctacgtattcaaagtaccgggaacggcaagttacctgcaaggcgacatcaacaatgatggcaagatcgaccgcaatgacctgacttcttatatgaactataccggattgcgtcgtggtgattcagactttgaaggttacatcagcaaaggcgatatcaacatgaatgacttgatagatgcttatgatatttctgtcgtagccactcagctcgacggcggtgtcgacagggaagctacggagaaagtatccggctctctgtccatcagcactccgaagaagcagtatcaaaaggacgaaatcgttgaaatccgtgtgaagggtaatgatctgcgttcggttaatgcacttagctttgctttgccttatgatcagagcgactatgaatttgtaggcgtggaaccgctgaatatgaaagcaatggaaaatctgacttatgaccgcctgcatacgaatggtgtgaaatccctctatcctactttcgtcaatatgggaaaacaggaggctttggaaggttcggaagaactctttattctgaaattgaaagcgaaacgtaaagtgaagtttgatctgaatctgaaagacggaatgttggttgataagcaactgaggatgcattcattctagaatgtatttcgtgtaaatcattgatatataacaaaagaggatgcctgtggggaactattggcatcctctttgggagacagacgggaaggattactttcacaagcag

SEQ ID NO: 4730 - DNA, 573 bp, Unknown
  gut microbiota DNA sequence
aaagagaacgaaatgaatcggttattggatgatacggattttggcgaaggatttaaaggttgtcgggaccggttggtgattgaagtgttttatgttactggcatgagactttcagaattaataggtttggatgataaggatgtggatttttcggcttctcttctgaaagtgaccgggaaaagaaataagcaacgactgataccgtttggtgatgaactgcgggagttgatgcttgaatatattaatgtaagaaacgaaacgattccggaaaggtcggaggctttctttattagagagaatggcgaacggctttataagaatctggtctataatttagtgaaacggaacctgtcaaaggtggcaacgctgaagaaaaggagtcctcacgtgttgaggcatacttttgctaccacaatgctgaataatgaagcagagttgggcgcggtaaaagaacttttgggtcacgagagtattacgactaccgagatctatacgcatgccacatttgaagaacttaaaaaagtgtataaacaagctcatccaagagcttaaaaaaaggaggtaagtatggat

SEQ ID NO: 4731 - DNA, 611 bp, Unknown
  gut microbiota DNA sequence
tcctgtttcagcgtataacgatggggaaactgcaccggatcgctttgtataaagtctgcgcgatgatacatctccgcacacatcaaaagtttattctttatatcttcagtcatttcgagaaagtatcaagtattgagagtacaaaaatacatattctagttggatttcctctttaagtaaatgacggattgtatccctaataaaataacaaacagatattctgccgtcatatacacagtcagagaagcatgaaaacattcacttaacagatacagataaatcaaatataccagaatagtgattaactggaagataaaagcgagcttcgtccttcctgtaccagtaacagcattaatataaacatatccgggcagtgcaaaagcataattcaacagcataactataaaaggatagaaagctaatctcaccagattatcgttattcgtataaaatccgacaatccattgattgctccaaagagctatccctatcaacggaagtcccaccacatagcccagcttaagaactttacgacaaacaggaaaaagttctttccccgctcctgctccaatcaaattactgactaacgctcccgtagtggatgcaaaaga

SEQ ID NO: 4732 - DNA, 270 bp, Unknown
  gut microbiota DNA sequence
aatgttcttattgcccctaatgttcagctttatacagcaactcaccctattgatttagatgaacggctagcgcctgttgaaacagaagatggaataaaacgagttcgccgcacttacgctttgcctattacaattgaggatggatgctggattggtggaggtgtaataatccttcccggaataacaattgggtacggtagtgtaattggagcaggtagtgttgttacaaaagatattccggcaaatagtttagctgttggaaatccatgt

SEQ ID NO: 4733 - DNA, 1678 bp, Unknown
  gut microbiota DNA sequence
tgtattgcttaaagatgccaccgcaccagccattgaagcatatctaatgcagcatcaatagttaacatgtagtttgtcttaccctggatttggttgactactataagtatcaactaaaatgaataaaagatgaaaaagagtgacatgacctttagtccttatcagcttgaacttcttggcgatttctatcgttcgaatttctcagtttctcgttttgcccaagaaaaagggattgcccgtattacattttggcgttgggttcgtatctttgaggattctaatcctgaaatatccgcttatatgaaaaagcacaagtctcccaagtcctcggaggaatcctcctcaattactgccttacgtcttgagaatgagcgtttacgtgcagagcttaaagatgctaaaatgcgtgcgcacgccttcgatacgatgattgatgttgccgaagagatgtttaatcttcctatccgaaaaaaagctggtaccaaacaataaaaaggctttgtaaagggaggcatgcctatacggtggtctctctttgcaaattgtttggtgtaacaaagcaagccttttataagtatgttgaccatagtacggatagttcggcccgtgaacgttttgttcttgagtttgtcaaacgtgtgcgttcaaaggaccctggtattggggggatgaaactttggctgatgtaccgtaatgagttcggcaccagccaggcctttgttgggcgtgactgtttctgtgctatattgtccaagtataagctgacaatacgcaaacgttttcgggctccacgtacgacagactcctctcatcacttgccacagtatcctgatttaaccaggacattgctattagaacatcctgatcagctgtgggttagtgatatcacttacattaccatatggttgcctgacggcagttatgtgttctgctacctgtctctggtgacagacgcctatacgaaggagatcattggatattgcgtaggtgatactctgggaagctgttacacagtggaagctctggaaatggcagtcagacgcatagctgcaaaggagattaagggtttgatccatcactccgaccgaggcgtacaatatgccagtgcggattatattgccatattacgacataacgggattcttcccagcatgacagaggatggcaatcccaaggacaatgccatagctgagcgtgtgaatggcattataaagaatgaattgctgcaaggaatgcgctttagttcaatacaggaagtcagaaaagctgtagcaacagccgttcacttctataacaacgaaaggcctcatatgagcttggatatgcttaccccggtacaggcaggagaaatgcaaggacctatcaggaaaagatggataagctacagagaaaagtatctgaatgtagcacttgcttaaaaataaatatgtacatttgcttatgaaaagaccaagaatgccctgctagcgggatagaaagaggaaaaagggtgagttcctttcttttttcttctttcaaagagaagagtcaaccggttaaaggaataagaaaaaaataagtaaaccggaggcaggaataataaataataaagtaaacagctgccagggttagtaatatttctagtcaacacatagcagctattagagataaacaagtcaaccattattagggaagtaca

SEQ ID NO: 4734 - DNA, 1283 bp, Unknown
  gut microbiota DNA sequence
atggcttcacccaattgcctgctcatcaggcgaatcacatcacccatacgtttcttctcaccggcacttgccacgcgggtcagctttgcaccacggagataggcaagactcgtaggaccacccgctttattcaccagatcggaaagacgttcctcacggttggtcatggcataatttcctccaaacagaatttcaccatcaatgactacattctgttgcgcctgataacccggactgcgacggacataaacttcgtcataaggctgaaggataaaaccgggctgaccgtcgatgacaaaaccatcctttaaagagaaggtatacatctgaccgatagtatcattatccgcagtactacggggattcttgattcgtctcgacacatcaatgcggacagtagaggcggcttctttcaagccaccggcctggatgatcagatcctcaagtgtcatgttatcagcatagggataggagtcagggtgcgcgacctcaccgtgaactgtgacattgccacgatcttccagatcgtgaatgctcggaatgtaaaggatgtcattcttcatcagggcaaggttcggggaagtaccgtccatgatagacttgatgtctatctgaacaacttcactggtcaaatcctcacgctggcgataaaggacggcacgattcaggaaagcgtcaccggtcaggccctgggcttcattgacaagttcgcggatcgtattcagtttaccgctgagctggtagatgccgggacgatagacagcgccacggatttccagtttgtttgtgaagcggttaaggatggcttcggctgttacaacgtcaccgttacgcattgtgtagatgctgtagtccatatccttgaccgtgttgacctcatattcctcaccattctgacggacaacacgcaatgaacgggtgtaggcatcggcttcaaagccgccggcatatttgattaaagtggcaaggttctcgtccttcttcatttcgaaacgcataggacgttttaccttgccgctgatctttaccaagacatcgtaggcggggacgataaccacgtcaccttcctgaaggcggatgtcatcctgtgtgttgcctttcatgataaattcgtagacgtcgatggtggcgatattctttccgttgcgtaccaactgaacgttgcggaggctgccgatatcactcacaccgcctgcacggtaaagcgcgtggaagacggtagagaaggaagaaagggcgtaggtacccggctgcacgacctctcccatcacattgatctggat

SEQ ID NO: 4735 - DNA, 611 bp, Unknown
  gut microbiota DNA sequence
ggtggcttctcggcaacagttacctttgatgtatctgccgacccggatctggctgctgtggaaattcagaaccgtgtgaagctggctgaatcccgtcttccggcggaagtgattcagaatggtatttccgtagagaaacaggcacccagtcagttaatgacactttgtctgacttctaccgatcctaagtttgacgaaatttacctgagcaactttgctacgatcaatgtgctcgatgtgattcgccgtattccgggagtaggacgtgtatccaatattggtagccgttactatgctatgcagatatgggcagagcctgataagctggctaacttcggattgactgtacaggacttgcagaatgccttgaaagaccagaaccgtgaatcggcagccggtgtattaggtcagcagccggtacagggactggatataacgattccaatcactactcaaggacgtctttctacagtagggcaatttgaggatattgtggtacgtgccaatgccaatggttccatcatccggctgaaggatgtggcacgtgtatccttggaggcttcttcatacaataccgagagtggtatcaatggtgagaatgcagcggtact

SEQ ID NO: 4736 - DNA, 181 bp, Unknown
  gut microbiota DNA sequence
cgcttagctcagctggttcagagcatctggtttacacccagagggtcgggggttcgaatccctcagcgcccacaaagaataccgaaacacttccgtcaacaaaagggcgcttagctcagctggttcagagcatctggtttacacccagagggtcgggggttcgaatccctcagcgcccaca

SEQ ID NO: 4737 - DNA, 2890 bp, Unknown
  gut microbiota DNA sequence
tggtttcaaaaatacattcttttatttaaaaacaaataataaatggaaggttttttatttgcaaatctattattcttcctgtttggtatcttcttggatttatatttatatctttgcagtcataaatatcggattttagttgaatatattcatgaatcgtatcaaaggcatactttatgcggcagtttcactcttccacttttggactggctccgtttttttcatcactttattgctgatcggtttttcagctttcgaagtactttcttatcgttgggggatagcttcggtagtgttaatcatattcggattattttccggctgtgactttcggttgaaaagaaaggatttggcagttgtgtttgctttgagcctgttgagggggtaagcatggttgtgtttcgtgaacatcgaatgaaaaggatataaaaaatgccgcatatagcggcatttgaattttgaggagagcctcttgtcggattcgaaccaacgaccccgagattacaaatcacgtgctctggccaactgagctaaagaggcgttttctgttttgcgggtgcaaaggtacgaatttattttaaaaatgcaaatacatcgtgtactttttttatatttgcagtctcactaatgattgcaagaagatgaaaaagaaaattatgaatgtatgtggtgtggctttattagccgttagtttactggcttgttcaggccagaagaaaggagcagaagctactgaaagtgcttccgacgcagtgaaagtgactgctgaagcgacgtcggcacaggctgatagtacaggatatattgtcagaataggggagatggcccctgattttacgattacattgacggatggcaaacaagtgactttgtcatctcttcgtgggaaggttgtcatgttgcagtttacagcaagttggtgcggagtatgccgtaaggaaatgccttttatagaaaaagacatttggctgaagcataaggataatgcagactttgcactgattggaatagaccgtgacgaaccgcttgaaaaagtgcttgccttcgcaaagtctaccggagtgacttacccgctgggactggatccgggagctgatatttttgcaaaatatgcattgcgtgatgccggaatcacacggaatgtgctgatagaccgggaaggaaagattgtaaaactgactcgtctgtataatgaagaagagtttgcttcactggttcagcagatcaatgaaatgctgaaataagtgcttattgccggtctctgaaccggatgcgggcacaatagatatagtgtcactatcacactgggatggtgacactatatcgttagtatggttacactattccgatgtgatactgtcactatcctgaatagggctttttctgattaaaataatacgctgtcaggcaaggctcagctttgccagatagtcataatgttttccttctttgattaatttcgctttgaatccacattcggaggcgtacaggctaagagtctgaaaatcgatatatagccaatcgaatgtatctccttttacatccttgtattgcatctggaaatctacttccccataataatcgcctgccaggtcgataagcatgctgccgtcttcttcttcgaaaagatagcgcagatcacttgaatccatcagaatacatccgccagggcgtaggatacgtttcatctgttggaagaaggcaggcatattatttagtgttcctatgatgcccgaaccattcatcagcatcagaaccgtatcgaatgtttcggtgaatgtttcgtcaaagagattgatcaggcgggaatctttgacgccgcgttgtttcattacttcgttggaaagcggagagatgtcaatggcgcaaacttcttttcccatttcttgaagtgccaatgcgtggcagccgcttccggctcctacatctaatattcttcccgtagccatttgcagagcagtgcgttcgaggactggcatggactgtatacttcggaataattccttaacggggatttcatcttcttcgaattgagaagagaatactcgcaagcggtcagctctgtgatgattgaaataatcggagattgcagctcccatcgggtccttttctgcggaaagggttattgttgccattttggtgattatgtattgttttatccgccaaagataaacaattccgtagaaaaggcttatctttgcatcagaaatgtgaatgctaacaatgtaatatatatgagtatagaagatgcaatcatgggtggaatcgtctttaaaggtaagaaagataagccccaggaggaggagaaagtgaagacgaaagcgaagaaagcgacttatattcgtggacaacatggttccggagccgcgaagatgaaagcggatattcggaaaaagagagctaaccgacataaaaaataaatgggaacaattgtttgtatactagcacttttgctggctggccatggacttggtttgatcattaagatgagaatgttttgtcttttaatcaagagagtcgaaacgaaatacattaagaagatagatggaatagtagtggatgttgatacttatgtgaaggatggaaagcttcttatgcgcccgtctgttgaatttacattagaaggagagggtgaaaaatgttgtcggtctatcaatcccaatattattgtggaggatatcacacaattttcatattacccgaaagattttcatataggtgataaagttacagtttggtataatttggataatgatgcaatgtttgtcgagcaaaaaatgcaattgacaagattgtttgttcgtttatttattcccggatgttttttcattatttcaagcattttggggatgtgttatgtcatgaatagctaacaaccttataaaaagaa

SEQ ID NO: 4738 - DNA, 1915 bp, Unknown
  gut microbiota DNA sequence
aaagattatatgtgtacaaagcaatcaaaaaatgaaatatttgcagcaaacattctattttttgattgctttatatctataatagggtatagataatttctatctttgtgaaaaaagtaaaatttgaagatcaatatcatgaaaaagtacattttatttatgatgagcgtttggttcatccagttggctatttttgcccagtctagaataatagaggtttttccggagcagggaaaagatattgaaaatatagcgttagctttaaaaaaagctgctgactgtaaaggaaggccggttactgtaaagttttcaccgggaatttatcagttagaccgtgcgaaatcatcacaagtgttatattatatatcaaatacgacttctgagttggatgatcctgatccgactaaacatatcggattgtatcttaatacattaaagaatgtcactattgatggttgtgggtcaactttattgatgaatggtgaaatgacaagtttcgtacttgataaatgtgaaggtattgttttgaaaaattttaatatagattataaacatcctactcaaacggaggttgaagtattggaagaggggaatgattatttgattgttcaggtacatcccacatcccaatatcggattgtagacgcacagttggaatggtatggtgatggttggtcttttaagaacggaatagcgcagtcgtatgaccgtataagtgaaatgacttggcgttcttggagtccgatggagaatttgcttcgtacagtagaacttcgtccaaatgtgttatatctgcaatataaagaaaaaccacaagtaggactacatactatttttcagatgcgcgattctttccgtgacgaagtgagtggatttgtaaacagaagtaagggaatactgttggagaatatcaacttctattatttaggaaatttcggggtagtctgtcaatacagtgagaatattactgttgatcgttgtaactttgctcctcgtccaggttcaggacgtactaatgcgggatttgctgattttattcaggtttctggttgccgtggtatgattgatattaagaattcccgttttataggtgcacacgatgatcctataaatatacatggtacacatttgcgagtaatagaatttttgtcggacaatcgtttaaaacttcgttttatgcatgaccagacttttggatttgaagccttttttaaaggagatgatatagaacttgttgattcacgttctttgttggtagtagggaagtgtaaagtaaaagaggcaaaattagtaacaccaagagaaatggaactcactctgtcaagtccactctcttcggaggtaatgcaacagaaagacctggttgttgagaacgtgacgtggacaccggaagtgcggattacaaacaattactttgcaagagtaccaaccagagggattcttatcacaacacgacgtaagtctctgatagaaggaaatacattctacggcatgcaaatgagtggaatatttgtagccgatgatggattaagctggtatgagtcaggaccggtacatgatttgactattcgtcaaaatacgtttttaaactgtggagaaccgattattagcattgatccggagaatagagaatataaaggggcggttcataaaaatattactattgaagaaaattatttttatatgagaaaaaatagctcatgtgccattcgagcgaaggctgttgatggcctgatgatacgtcataatttgatttattctctagatactgaaaaaaataaagagtctgattttattcagatgtataattgtaatgaagttacaataaaagaaaatcgggtacagttgcaccacctatttaaatgaattctatttcaattttaaaagaaatagataaatatatagtaaaagattt

SEQ ID NO: 4739 - DNA, 3943 bp, Unknown
  gut microbiota DNA sequence
aaccgcttttaatgttgtatctttgtaagtgaaaaccggaagtaaattcgataacattgataatatagacgaaatatgagcaataataagtattatataacaacagattacaggcattcccactccgggtaatgcttgttggatagtctgatacaagctaagggctgcgattctttatgggaattgcggccctttttgttgcttaatattgatatttattgcaggaataacgaaatccgagtttataataaacttggaggacgtttataataaacgatgaaagaatttattaataaatgattggaggttactacataattagtcaaagtctttcgtatagatgttggtgctgattttgaaaagttctttattttctaggtaaatcgatgaattattgctacaatactacctttctctttttgtgtcatataactgaataccttatgatgttatgaggagaataatcttcggacttaatttttattttcgctttattagctattaatacgaatcagcggttgattcaaatctgtatgcatttgctccatttgaataccaagcccgtaaggagctaattccacaggttttgaaatattttcgtcatatctactatacccttccgctttttttcgtacttttaccccttgttggaaagtagcgcctttctgacccctgagaacagaaaaagaaaaaacaatatataaaatgaatcacaaatggaattatcaacccattacacccgaacaggcagagacaagccagacattggcccaggaattaggcattagcccgatacttggacaacttttggtgcagcggggaataacgaaggcaggagatgccaagaagtttttccgcccgcaattgcccgacctgcacgatccgttcctgatgaaggacatggacattgcagtagaacgtctgaacaaggcgatgggaaaaaaagagcgtattctgatttatggagattatgatgtagacggtactactgccgtagcattggtctacaagtttattcaacagttctattcgaacattgactattacatacccgaccgctacaacgaagggtatggcatttctaaaaaaggagttgactatgcctcagagaccggcgtaggattgatcatcgtactcgactgcggaatcaaagcagtggaggaaataacgtatgcgaaagaaaagggaatcgactttatcatctgcgaccatcatgtgccggacgatatcctcccccctgccgtcgcaatcctgaatgccaaacgcctggacaacacttatccatacacccacctttccggttgcggagtcggttttaagtttatgcaggcatttgctatcaacaatggtattgaatttcatcatctgattccattgctcgacctcgtagcggtgagcattgcgtcggacatcgtcccgatcatgggcgaaaaccgtattctcgcctatcacggtctgaagcaactgaacagcaaccccagcgtcggcatgaaagccatcatcgatgtatgcggactctccgaaaaggagatcaccgtcagcgatatcgtgttcaaaatcggaccacgtatcaacgcatcgggacgcatccagaacggtaaggaagcggtggacctcctcacagagaaggacttttctgccgcactggagaaagcgggacagatcaatcagtacaacgaaacccggaaagacctcgacaagagcatgacagaagaagctaacaatattgtggccaatctggaagggctatccgaacgccgttccatcgtgctttataatgaggaatggcacaaaggtgtcatcggcatcgtagcatcccgtctgacagaagtttactaccgcccggcagtagtactcacacggacggatgatatggccaccggttccgcacgttccgtctccggatttgatgtgtacaaagcgattgaacattgccgcgacctgttggagaacttcggcggacatacctatgcagcggggttatccatgaaagtggagaatgtggaagcctttacccgacgatttgaagaatatgtgtcacaacatattctgccggaacaaaccagcgccgtcatcaatatagatgcggagatcgacttcagagacatcacatcgaaattcttcaatgacctgaagaaattcaatcctttcggtccggacaatatcaaaccgatcttctgtacgcatcacgtctatgactacggaaccagcaaagtagtaggacgcgatcaggaacatatcaagctggaactcgttgacaacaagtcgaataatgtcatgaacggcatcgcattcggacagagttctcatgtgcgctatatcaagacgaagcgttcattcgacatctgctatacgatcgaggagaacacgcacaagcgtggcgaagtccaacttcaaatcgaggatataaagccgattgaataagtatcaggagatattaaaacaatactggggttatgactccttccgcgacttgcaggaggagatcatcaccagtatcggcgaaggcaaagacacactgggactgatgcctaccggaggcggtaagtctattacatttcaagtgcccgctctcgcccaggagggcatttgtatcgtcatcaccccgcttatcgccctgatgaaagatcaggtgcagaatctgcggaagcgggaaatcaaagctcttgccatctattcgggcatgacgcggcaggaaatacttaccgcactcgaaaactgcatcttcggcaattacaaattcctttatatttctccggaacggctggatacggaaatattccgcaccaagttgcgttcgatgaaagtctccatgattacggtagacgaaagccactgtatctcacaatggggatacgacttccgcccggcatatctgaaaattgcagagatacgggaactattgccggaagttccggtactggcactgacagctacggccactccggaagtcgtaacagatattcaggcccgtctgaaattccgggaaggaaatgtcttccgaatgagctttgaacggaagaatctggcatatatcgtgcgcaaaaccgacaacaaaacgaaagaactcctatatatcctgcaacgaatatcaggcagtgccatcatctatgtccgcaacagacgccgtaccaaagaaatcactgaactgctgatgaacgaaggtataaccgccgacttctatcatgccggactggataacgccgtcaaagacctccggcagaaacgctggcaaagcggagaagtccgcgtcatggtggcaaccaatgccttcggcatgggtatcgacaagccggatgtccgcatcgtgctgcatctcgacctgcctgactctcccgaagcctactttcaggaagccggacgtgccggaagagacggagagaaagcctatgccgtcatcctgtactccaaatcggacaagacaacactccataaacgagtggtcgacaccttccccgacaaagagtacattctgaatgtctacgaacatctccagtactattaccaaatggcgatgggcgacggttttcaatgtatccgtgaattcaatctggaagagttctgccggaagttcaaatactttccggtgccggtagacagtgccttgaaaatactgactcaggcaggctatctggaatacacggacgaacaggataattcatcacggattctctttaccatccgtcgggacgaactatacaagttgcgggagatgggaaaggaggcggaagctttgatacaaagtattcttcgctcatacacaggagttttcaccgattatgcctacatcagcgaagagtctcttgccgtccgcaccggactaacacgccagcaaatctataatatattggtgacgttaaccaaacgccgcatcgtggactacattccccgcaaaaagacaccttatattatatatacgcgcgaacgactggaattacgtttc

SEQ ID NO: 4740 - DNA, 6043 bp, Unknown
  gut microbiota DNA sequence
ccccccagcgtctacgaagagcgcaaagcccgctatgaagcacgcatcaaggcaatggaagaatacgtcaccaccgaaaacatatgccggagccggatgcttctccgctacttcggagagaaaaacgaacacaactgcgggcaatgcgatgtctgcctcagcaagcgtgccaccgacaacttatccgaggaatcttacgaagaagtgaaaaggcaaatactcgacttactcagccacagccctctcactcctgccgaaacagccgatcagataaaggcggaaaaagaggatatcggacaagtaatccgatatttattggacgaaggcgagctgaagatgcaggacggaatgctacatatttcaaaataagttattacatttgcagataaactctaaaacaacactatcatgccgaacttttttaagtcttttttctccggtaagtccgaaactccggagagtgaaaaacagaaaaacgatcagaaaaacttcgagatattcaaatatgacggtttgcgtgcacaacgcatgggacgtccggattatgccataaagtgctttaccgaggcgcttgccatcgaagaggatttcgaaacgatgggctatctcagccaactttacatcccgatgggagaaaccgaaaaagcccgcgaacttctggagaaaatggcagtaatggaacctcatgtgaccagcacattcctcacactggccaatgtctgctacatccaggaagattacaaagcaatggaagaggctgccggcaaagcaatcgccatcgaagagggaaatgcagtcgcacacttcctcctcggaaaagcccgcaaaggacaggatgacgaaatcatgaccatcgctcatctgacgaaagccatcactctgaaagacgacttcatcgaagcccgtctgatgcgtgcggaagctctgctgaaaatgaagcaatacaaggaaacaatggaagacatagacgccgtactcgcccagaatccggaagaagagaccgccatcctgctgcgtggcaaggtgaaagaagccaacggacaggaagaagaagcggaaacggactacaagttcgtaacggaaataaacccattcaacgaacaagcctatctctatctaggacagctttatatcaatcagaagaaactggcggaagcaatcgccctgtttgacgaagccatcgagttgaacccgaacttcgccgaagcctataaagaacgcggacgcgccaaactactgaacggtgataaagacggttccgtagaagacatgaagaagtcactggagctgaatccaaaagacgaagctagtctgaacggagaattcaagaacctgggaccgaaaccggaagcactcccgggaatcttctaggcagacggcggtatatactcatttttaactgaaacattactgtcatatcaggtgaccttttcatcttttttagagaagaaaacaaaaaaagtatcgctttttgtttgcatctaacagaaaattattacttttgccccagaattagaaaccaaagcagaaacaaagattcgtatgaaatcattttcttatgcatattacttctttttttacttttactttagccagaaagtagagcgggagtttgtatgtatcaagtgacatgatgcttaaggactgagatgaagaaattaatcatataaatcccgcttccatatggacgcgggatttttttatataaccatattagaacaatgaaaaagatagcaattcaaggaacactcggctcatatcacgatatcgccgcacacaagtacttcgagggagaagaaatagagttaatctgttgtgccaacttcgaagacgtgtttacttcgatacggaaagacagccaggtcatcggaatgctagccatcgaaaatacgatagcgggaagcctgctgcacaacaatgaactgttgagacaaagcggtacgcagattatcggcgaatacaagctgcgcatctcacatagcttcgtctgcctgcccgaagaaagctgggaagacctgacagaagtcaactcccaccctatcgccctgatgcaatgccgtgattttctgaatcagcatccgcaactcaaagtagtggaaggagaagatacggcacgcagcgcggaaatcatcaagaaagaaaacctgaaagggcatgcagccatttgctcgaaaacggcggcagaacgctacggaatgaaagtgctccaagaaggcatcgaaaccaacaagcacaacttcacccgttttctggtagttgccgatccgtggcaagtggacgaactccgccagcatcacgcaaaggcgaccaacaaggcaagcatggtattcacattgccacacacagaaggaagcctgtcgcaagtattatccattctttcgttctacaacatcaatctgacaaagatacaatcgctgccgatcatcggacgggaatgggaatatcagttttacgtcgatgtatctttcaatgattatctgagatataaacaatctatagcagcaattactccattaaccaaagaacttaaaatattaggcgaatatgcagaaggaaagtcaaacgtataaaatcgctcctgccgaaagactggcaagtgtcagcgaatactacttctcaaagaagctgaaagaggtagcacaaatgaatgcagaagggaaagatgttatcagtctgggtatcggaagtcccgatatgcctccttcaaaggttaccatcgaaacattgtgcaacaatgctcacgatcccaacggacacggttaccaaccgtatgtgggcataccggaactccgtaaaggtttcgcagcctggtatcaacgctggtatggagtggaactgaatccgaatacggaaatacagccgctgatcggttccaaagaaggtatccttcacgtcacgctggcttttgtcaatccgggcgaacaggtactggtgccgaatccgggataccccacctatacttctctgagtaaaatactcggtgcggaagtaatcagctacgacctgaaagaagaagacggctggatgcccgatttcgaagcattggaaaagatggacctgaaccgcgtgaaactaatgtggaccaactatccgaatatgccgacaggagccaacgctactccggaactctacgaacgtctggtagacttcgcacgccgcaagaatatcgtcatcgtgaatgacaacccgtacagctttatcctgaacgaaaagccgatcagtattctcagcgtaccgggagccaaagagtgctgcatcgaattcaactccatgagcaagagccacaatatgccgggatggcgtatcggaatgctggcttcgaatgccgaattcgtacaatggatactgaaagtaaaaagcaatatcgacagcggtatgttccgtgccatgcaactggcagccgccacagctctggaagccgaagcggactggtacgaaggtaacaaccacaactatcgcggccgtcgccatctggccggcgaaatcatgaaaacactggggtgtacctacgacgaaaaccaggtgggtatgttcctttggggaaagattcccgcttcgtgcaaggatgtagaagaactgaccgaaaaagtattgcaccaggcaagggtatttatcacgccgggattcatctttggcaacaacggagcaaggtttatccgtatttccctttgttgcaaggatgccaaactggcggaagcattggaaagaatcaagaagctttcttaaaaagaaaagaccgataaaagtaaatcagcggcagaccaggaaacgcctgcccgaaagagtaagaacaagaataaaataaaaacaataagaatatggaactcgaatcaattttattaccgggcatcgaagccaaaagaccgattgttatcgccggcccgtgtagcgcagagactgaagaacaagtaatggaaaccgccaaacaactggcagccaaaggacaaaagatataccgtgccggtatctggaaaccgcgtaccaaaccgggaggtttcgaaggaatcggtgtggaaggacttgcctggctgaaggaagtgaagaaagaaacaggtatgtatgtttctaccgaagtagcgactgccaaacacgtttacgaatgtctgaaagcaggaatcgacatcctttgggtaggcgcacgtaccacagccaatcctttcgccgtacaggaaattgccgacgcattgaaaggggtcgacatccccgtgctggtaaaaaatccggtaaacccagacctggaattgtggatcggtgcactggaacgtatccacaacgcaggcttgaagcgtttgggagctatccaccgtggtttcagcagctacgacaaaaaaatataccgcaaccttccgcaatggcacattcctatcgaactgcgtcgccgtctgcctaacctgccgattttctgtgacccaagtcacatcggaggaaaacgcgaactggttgccccgctctgccagcaggcaatggacctgaacttcgatggtctgatcgtggaaagtcactgcaatccggactgtgcgtggagcgacgcttctcaacaggtaacgcccgatgtactcgactacatcctcaacttattggtgatccgtaccgaaacccagacgacagaaagcctgagccaactgcgtaagcaaatcgacgaatgcgacgataacatcatccaggaactggctaaaagaatgcgcgtagcacgtgagatcggtacttacaaaaaagaacacggaatcaccgttcttcaagcaggacgctacaatgaaatcctggaaaagcgcggtgcgcaaggagaacaatgcggtatgagcgcagactttatgaagctgatcttcgaagcaatccacgaagagtctgtccgccagcagatagagattattaataaataaaaagcccaaaagaactcaaaaatcaaatggaaactaacaaataagtcagcagtaatacaactgagaccgactagaaagtcggtagtatcttaactctcctccttctggaaggaggagaataaagatagaatcgacttgttagtcaccccaatgtgagatactattaacttttagagatactattgacttttgagaaactccccaataataatagatatgagaatattaatcctcggagccggtaaaatgggttccttctttacggatatactgagttttcagcacgagacggccgtgtttgacgtcaacccgcaccagttgcgtttcgtgtataacacgtatcgtttcaccacactggaggaaatcaaagaattcgaacccgaactggtcatcaatgccgtcaccgtaaaatacacgctggatgctttccgcaaggtattgcctgtgctgcccaaagactgtatcatcagtgacatcgcttccgtaaagacaggactgaagaagttctacgaagaaagcggattccgctacgtttccagtcaccctatgttcggaccgacgtttgccagtctcagcaatctgagcagcgagaatgcgattatcatcagcgaaggagatcatttgggaaagattttcttcaaagacctttaccagacgctgcgcctgaacatcttcgaatatacgttcgacgaacatgatgaaacggtggcatactcgctctccatcccattcgtttcgactttcgtatttgctgccgtgatgaagcatcaggaagctccgggaacaactttcaagaagcacatggctatcgcaaaggggctgctgagcgaagatgactacctgctgcaggaaatcctgttcaacccacgcaccccgggacaagtggccaatatccgtacagagctgaagaatcttctcgaaatcatcgaaaagaaagatgcggaaggtatgaaagcctacctcaccaagattcgggaaaagatcaagtaaatcatcctctccttcgataagatttaaccatcccctgcaaaaaagttctttgcaggggatttttttatatgtacctttgtatccgcaaaaacggaatcacaggagaaaagaagaatgatagatcaagttaccatagaccgaattttagatgccgcacagattgtagatgtagt

SEQ ID NO: 4741 - DNA, 3273 bp, Unknown
  gut microbiota DNA sequence
atccgacgagtcctcctccattattcaactaattctaaagttagatatttttcaccattgaatttgttgatcttcgtcagggatcaaagtattaagctgacgtaacatcgacaacgatccttctacctgataactaatagatgatcccggaatttgagtaatatccttaaaagagtagttcaagttgagagtaataaatattttcttcaaataaaccttcaatggatccatctcctcacttattgaataactttgtaccccactagtagtaagttctatttcatcattatctgaccaaacttctagttttttagtttgtaaatcgacaatctcgtccgtaaatcgaataaaaactttatattgtttacgatccaaataatcaatatctctcgtaccggcataaataaaaatcgtgttatcatctaccacatatgcccgcgtggacgcaacagtcaaagggaccgttttatctccttctaagtaacacttgtactgacttgcatcatacgtacccgaatagtcattgaatggaagcaggtgtaacattgctctccgataatattttctaggattgacctgataaccataagacggatctgtcaatatctgcaatggcaacacccacttatccgactgatctaatgactcatccaatgtgaactcaataggaagtaccgccaatgattctccagctaacatttccacagtttctggcatattgtaatattgaccgggcaactgccgaaaataaagttcttcacgatgaccatactgttcttcattcagcactgccaacgtatcagggtccagaccaacatggatagtccgattttgtgtatttacagttgaaccactcatcaaaattggaaggtcatatttgactactccaccagaattgaaacgtacataagttgtcgtcacaccttgatctgtaacattcgctttgaaagatgcctgtaataaatactgttcatcttcccattcattattgcaggctgcgaaccccataatggtcaccaaccctaaaaatagataatatatattcttcatctttcagattttaaaaagattattcaggatttgtccaacctggattctgaatcaggtttatattatgttttaactcttcatgattaatcggccatagccacattttagtagcaaaaatagtcggtaatgtcgtacacattgttggagtatggaactgatccttcatcgcttccgtagctaacatattgcaaccatatacaggaacagcctcctctactggagcatccatccaacgacgtaaatcccagtaacgatgcccttctgcaaaaaattcaatctgccattcacgtttcagtttagtacggaatctatcttgattaccatatacttccatactatagtcaggtaatccagcacgacaacgaatcggacgaataccttttttcatttcgttaatatcacgacttacagaatgaattttatttccatcccatgaaggaatctcataagatcctattaattcattcagagcctccgcataaatcattagaatttctgcataacgaatagccggatctgttttcttctctatacggctttgatcataagctgttttttccgtataactgatatcatccggatgcacatacttcttaactccaataccagtctgaagagtataaccacttgtatatccattgttataccccttatagcctccccgataatagaatataggaatatttttttcctcatttttgctatcctccgcattcaaaaaattccatgtacttccattataagcaactgaagcataaaagcgtggttcgcgattcacatattgtttagacacaccctcacctaacggtcccaattccggatactgtgcaagttcgcctgcttccacataacctgctggtctagagtttgtgttgtaacgcccctcataccctgtatagccttcatacatatcattcatacctggacaatcttcaccatcgttcatataatatgcatcacactgcttttgtgtcataccatgcgacccatatcctccaccaccgcttcgtggtaactgatgaactaccataatacctattccttcactaccctgatttgtgccacgggtaaaaatcagttcctcgttttgactagctataatggagccgtcaaacaattcacgatatgattgaaacggatctatgtttttccagccatttggccaatcttgttcggagaaatccccatcagccggtggaactatagttttgggataagcaatatttccttcactagcattataattagctacatgcaatccatagaaattcaaatccattacatctttagcagcagctgcagcctttgcccatttagattcatcataggattctgggagcaaacgctttccatctttatttatcaaagccaatgaaacaacatctggagccttaccattaaatagtgggctagctgcatacagaagaactttagcacgtaaagcaagtgcagctccacgagttggacgagtaatctcttgcactcctctctgaagaggtaaaacatttgcagctttcaagagttcgttagtaatatattccacacattcatcatatgaattacgaggatacgctagctcgtcatattcttgagtataatctattccctcatctggaataatcggcacaggtccaaacgcccgaagtgtcaaccaataaaaatacgctctaagaaaatgagcttgtcccttaaagtctgcaatttcttccggagtaaacagctcatttttatcaatattattcagaaaaatagatacttgacgaattcccttataggcgttctgccaaatacctgaactcgaaccatatactccgttttcattatattgtccacttttccactttctgtaaccattagcatcagaatcttcccaataatacatatcatctgcaaaattgaaaggaatatttttcttgctactaacatcttgcaaatagccattagctagaaaagcatagcctctagccaaccagctgtttgtataatctttattatgaaagacatcgtctatagacatacgctcatcaaagatataatctgagtccaaataatcagaacatcctgccaaagaaatcaatcctactgtaaaggataaaattactatcagttttttcatatatgtgttcatttttataaattaacagatacccctaaagagaaagttttattaagcggatatttctttccatccgaacttcccatttcaggatcccaaagcttaaa

SEQ ID NO: 4742 - DNA, 1139 bp, Unknown
  gut microbiota DNA sequence
agaaaaagtaagcagatttgtagcagtaaaaaagaaacgtaccttattcaagtgagccttacgtactagtgccgttggaagtgaataacctacatccagagttttcaggcgaagataagctccgtttctaagccaaaaagtagaagcacggttattatttgaattatttccgtaagttaaacgaggataatcagcattagggtcttcgtttactcccaaaacccatcgattactatttgccatttccttcaacacatttccccaaccatcaccaccggaaaacatataaacagtggaaccgtttataaaataagatgatttaccaacaccctgaaaatgtacactcacatccaaccccttccattgagcagatgcaccaaaaccataagtaaaattaggctttgtagtagatccaatagccactttatcattatcatcaattaccccatctccattaatatctttatacttaatatcacctggcataacttcaccgaattgttttggccaattacgaatttcttcatagtccttgaacagccctaacgctaccaatcccattgcctgattcacacgatgtccttcctgcatcttataccaatagatactattttcttcatcgcgttccacgatttcattcttaccataagtcatgtttccgcgtatcgtcagattcaccttatcaatcttttgtttaaaggtaaaacgtccatcaaatccttccgcttttactactccaacattagcagatggcttactttccaaacctacaatccatggtaaataggcccgttccatgtagataccttctcttttctctttataataatcgatctcaccagtcaacttgtcattaaaaagtgaaaagtcaatacccaaatcctgtttggtcgaaatttcccatgagacattagtcgaggctaatgtagagtaacgcatacccccataatatctgttataaccaacatctgcaaactgatatcctcctgtaggctgaggattatccccatctgtcatcattgtttcgattgtatacaaataaggaaaacgaagatctttctttaaaatatcattacctgttttaccccaagaataacggattttaaacatgttaagccaatttaatcctttcataaatg

SEQ ID NO: 4743 - DNA, 673 bp, Unknown
  gut microbiota DNA sequence
ctgctcaaaagcaaaccaccactcatgacatccatatcctgttattggaaaggggaaacaaacagccgctaccaatggcaacctgcgttcttaatccgctaggagcttatgccgcaaccgacatggagggaaaggctgtactaaaaaacgtccccacaggaaaatacatattaaatatttcgtatgtaggcttcgagactgtgcaacgggaaatcaacgttgaacaaaacctggatctgacgatccgcatgtctcccacttcgctagctttgaaagaggtagtagtggtagcaaaacaaaatgcggccggagaatctaccagctccattataggcagacaagcgatagaccatttacaggctatgagccttgatgatgtgatgcaactcataccggggcacttaatgaaaaatacagatctgacatcccgttccaatgtacagctccgtactcttgttaacaataacaccaatgccttcggttcgagtatcataatggacggagttcccatgtccaacaatggtacactatcgcaaggaggattttcaagtaccgcatttgtcggaacagacttacgccaaattagtgcggacgatattgaatccgtagaaataatccgtggtattccttctgccgaatacggtgatttaacctccggacttgtagttgttca

SEQ ID NO: 4744 - DNA, 494 bp, Unknown
  gut microbiota DNA sequence
tgcatccgaaccaaagcaacataccagcgttttgagtgtgctacgccttcccctgtcccattaataggcccagcattgagtgatttcttttttcttaaaatcatgtttttttaccccatgtttatccgttacttcttaggtaactcacaaacaaaggacaagcgaaacagggaacttttttcaacgaaaacatcggaagaggactggtattcaggaaataaggcagaagtgaaggtgtttttcataaattggaataaaaaaaagacataacacggatattgtcattttccgtctgttatgccgacttttgattcattttaagaaattaatttcatttttgtttgcgtattttcataaatatgtccatctttgcgccatgaatcattccgttacctaagaagtaacacacaccaataaacactgtatatcaggattctaaatcacacatacaggccagaaccgcacctcttaacgtaagacaaattcatccggtt

SEQ ID NO: 4745 - DNA, 324 bp, Unknown
  gut microbiota DNA sequence
ataaggctgcacagcattacttaccgaacttgatagcagaccgccaaacggataataatggttcacttcttcaacattaccactctggtctacaaccacacggttattacccaaatgatcctggacaaaatagtgatacttagaatcggccagtgtaacatagccagcttctgtaagcaacttgacagggattccattttcatagatcacattgccgcaataatcagttactgtagtatcactccctatgatatgcgtcgtacgaagttttattccatcagcatcataaagataagaaatgacatgaccgttttcaaattctat

SEQ ID NO: 4746 - DNA, 503 bp, Unknown
  gut microbiota DNA sequence
gactatcttatatggtctgatgcaatgaacctcataaggaagttagccaaagacgagaattataaaatctcactccttattagtttgggatgcttcacaggattaagaatatctgatattctatctctaagatggaagcagatattagatactgacgagtttacagtaattgagcaaaagacaggcaaggtaaggactatcagactaaacccacaattacagcagcatattaaggagtgctacgagcatataaatcctgttggaatcaattcgccaattcttataagtcagaaaggcactatcttcacagtccaaagaataaacatcattcttaaagaggtgaagaagaagtacagattaaagattaagaactttagctgccattcgcttagaaagacttttggcagacaggtctataacatgaacagcgataacgcagagttggcattagtaaagctgatggaactgttcaaccatagttctgttgccattactaaaagata

SEQ ID NO: 4747 - DNA, 54772 bp, Unknown
  gut microbiota DNA sequence
aacttaccggcattgctgcttaccgcaaaatgaataaatggattgtccgctgtcccggtcttcaggaacgcctgctcgatctgggctatcagccgcagcaccgttcttacactccgctggaggtaagggtgatcgtggatgcgctgggagaaccatgagcaggtaataagtattaggtaacaggtaataagtgttgtagactgcgaggggcgttttgtattagctaaagctaagctttagaggccataaagcaccgctttagaaggcgtaaagcatagctttagcctacacaaaacgctatactctgattttcataaaataacgataaaagacgatgttatcaacaggtacagtaggtacacttttacccgccctccctaacacacgcacacgcgtgcgtgcgcgtaagtacctttaccgtcaagattgacaatcagtccctgttttaccagtcgtttcagccaggtgagggcagtgttgggcttgattcccatagtcgtagcctgctccaacaactgtgcacgggtaaattggatacccagtgcctcaaagaatgcgtcacggtcggcattggccctatggctgacttctgaaggaggaaggaaagacaagatatgcgtggcatgctgatagagtggtttcacaaggttcaacacagccttaaaatcttcgggagtgatcgtcatatcccaacgggtaatgataccgtctttgatattatcagtggcgatttccttgtccggtgtaagcaggggatgagaagatgcctggtattgatacggctgaggattttcaaaagcacgaagcatggccactactgacatgatacggcagatgttgacagccattcgggcgatggaactgttcatttctctgccattggcaatcgttgaccgggtgaacagttcggaaaagagatcattgaactcctgtttctgttcatctgtgagccggagtgtgtggagaccatgttccttgagtaagttcaagagctttttccattccagaccaatggaggtgaagatggcttccaagtccgtttcgttctcgtcaaactgattgatccattgatagatgccgtgcatataatagaacagctggcgtgaaaaaagtccgttctctactgaaggaatgagtggtttcacctgtgcgggtgtccccgaaagcaggagagagaggtaacttttcttgttttcccggtactcctgattggtacgtcggttgtatgctaaccagtcatggtcgaatgctctgcgaagcgtctcactccagtgaccgtattccgaaccgatggcggtagagatcgtatccgcctcggtttcgcagatgaggcctgttccgttgttatccataatattttgaaggataccggtaccggtattgttgccggagatgaggaacattctgtttaaaggtatttcggggatttccgctttggcacgctctttgcccatcatttcgtaggcgacttttgcctttttgtagacattcatctctttttcaacttgttggcggatatcatcgtggataggcataacgagcaggcggatgagtgatagtactcccttgcccgaggctgccggagctacaatgaaggattgcatgcagggcgattggtatttgccggcataatgacatctcacgtatcgttccatggtggcacccagggcagtcaatgctccgagcaagagtacgtctttttgagtggcggtagtgccataacttatgatacgtagcagtagcttcggccagtcttctaaggtgaaagtaggtaatgggtgatgcgggtcgctgccttccagcagttcttctgattcactcttttcttcttctactttattatatacgtgcgcgtgtgtggaaaaattgtgcggtgaactttctgtacctactgtacccgtccggttgttcataacttccttccggtcttccctgcagatttttactactgtcgattcagcgaggtgaaatgccgttccgagatgtattgctccctgctgtttcgtgagtgcattggaaaacattcgttcggcatgggcggattgatacttggcggaaatccggcacaggcgatgaaaaaactcccgtcctgcttcaccacagtccgttgcgatggcgaatgctaattgtacgtactcggcgtaagtgggtgcaatgtcggcacctgctgtttcgactgcttcggtgaggaggcgtaaagattcaatatcggtcattttttgataattgacaattgacaaatgataattgacaattgaagtttgatcattcgtgattataatttaatattctctgaatagtgcttgtgggtcatggctgaggaagcaggctcttacgatgtctttgccggaggtgtctacggctttttgaactgtttcgatggagttgttcatttctgatccgtaggtcatttctacgtattccattgcccagctcatactctctcttacattacggctctgatcgtctgtgtacaggttgctgtaaggtacgaatgttttcacaccccggttgctgggactgataaatgcgagtacagggtggagaaaaggatcgtcgaacagtgtacgacgcatttctacggctttctgataggagtcgaggttatctatatctaccactacgagtccggaaggagatgcgaagaatttactgttccggcggatgaatgtgccgcacggagtcacgtatggcagcaaggatgttttcgccattcgtatatcttcggcgctgcgcacctgttcggtcagtgctttgagattttcattgcaggtgatcatctgatatacttgctctactgagacttcgcagaagggagtgagagtggcgggtgtaacggtttgtccttgttcgttcctgatgggagcaatcgggggcatgaaataagacattctgaaaaagttttgcatagaatacttctattaggacgtttaataaatgactttgactttcaaagcatggtgcgaaagtaagacaaataaaataagtcgagttcagatatgtctgaagtagtgtgaaaatgtttaatatataagacgtgtttttaactaataataagaaaaatggaaaataaaatcgtgcatcctaaactcggtgagtttattgaaaaggtgcttaaagtagcacatgtgaatctttcaaaaatgtgtcaagagatacatatgggacctgctacttaccaaaaggtaaaaaaggggaagaaaaagctctgattcattatgagcgtattcttgaatattattataggactcgcaccgaagaagagtttttggagaaagtgaatgagtgggcaaaactttatattcgatataagaaggagaagaatgacatttgaatattggaattttttagtagctttgtgaaaaagaaagttgttatggaagatttgcagagattatatcctatagggatacagacattttctaagattcgtgagggaaatttcctctatgtagataagacagaatacgtttaccggatgacgcattctgcttccagttatatgttcctgagccgtccgcgtcgttttggtaaatcattgttaacctctacgttgcatagctatttctccggtcgtgaagaactgtttcgtggattggcgatggagaagctggagaaagaatggatacagtatccggttctgcacttcgatatgagtatggccaagcacgtggacaaagataaactgatgaatcttttagacttcatgctaacagaacacgaacgtacactagggattgatgcagcaggtacagaccctaatttgcgcctgactaatctgataaaacgtgcttatgaacagactggcaggaaggtcgtggtccttattgatgaatatgacgctcctttgctggatgtggtacacgaacgggagaacttgggggtattgcgtgacgttatgcgtaacttctatagtccgttgaaagcctgtgatccttatttgcgctatgtgtttcttacaggtatcactaaattctcacagctcagcattttcagtgaactcaataacatcaaaaatatcagcatggatgaaccttatgctgccatttgtggcataacggagaatgagatacttacccaaatgaaagaagatgtggataggatggctgtcaaattgaatattactgcggaggaagtactggctaagttgaaagagaattatgacggctatcatttcacttatccatcgcccgacatctataatccattcagtctgctcaatgcttttgcagatgggaaatttaattcttattggtttggtagcggcactcctacctatctgataaagatgctggataagtttggagtagagccttctgaaataggaaataaattggcggcggtcgaagaatttgatgctcccactgaaacgatgagtagcattactccattgctgtatcaaagcggctatgtcactatcaaggattacgataaggaattggaactatatacgttggatattcctaataaagaggtgagggtgggattgatgcgaagcttgttgccttattatgtaaccaatgacacacgtgaggcgacgaacatggtggcttttatttcccgtgatatccggaaaggtgatatggacgcggcattacggcgtttgcaaacctttctgtctactatacctcaatgcgatcatacaaagtacgaaggtcattaccagcaggtattctatatcatattcagcttgctgggatactatgtggatgtcgaagtacgtacttcccgtggtcgtgtggatgtagtgttgcgtactgaggccacattatatgtgatggaattgaaactggataagaatgcgacagttgctatggaacagataaatttaaagaattatccggaacgctttgctctatgtggactgccagtggtgaaggtggctgttaattttgatagtgaaagtggcacactgggggattggatgattgaaaaatagagattgataagtgaatataaaaagtgtaaggacgaaggccattttctttaattatcagattaataacattttaataactccctaaaataaaaagagccccgcaaggggcttttcctttgtctttttaatagacatgcaaagaataatgtgttttttcttattgtaaccttacgatttatacttttttattcctctcttaattaattttatcacaaatatttggtattttcggacgctttttggacaaacgacttgaattactaatagtttattatatggaaaatatcgaaacagcgatcctgctgatggtggtcggcatggctaccgtatttgttattctgctgattgtgatttatttaggtaagttactgattactcttgtcaacaagtatgctcccgaagaagtgattcctgcgaagaaggaagcgctacaaggtcctgcgcctattccgggtaatataatggcggctatcacagcagctgtgaatgtggtgacattaggaaaaggaaagattacaaaagtagaaaagttataaacctatcaaaagtatatcatagaaaaacatgaaaagagaagttaagtttagtctggttttccgagatatgtggcaatctgccggaaaatatgtacctcgtgtagaccaactcgtaaaggtagctcctgccatcattgaaatgggctgtttcgcccgtgtagaaacaaatggcggaggttttgaacaagtgaatttattgtttggtgaaaacccgaatagagccgtgcgcgaatggacgaagccgttccacgaagccggcatacagacacacatgctcgaccgtgcattgaacggactccgtatgagccccgttccggcagacgtccgcaagttgttctacaaagtaaagaaagcacaaggcacagatatcacccgtacattctgcggattgaacgacgtacgcaatatcgctccttccatcacgtatgccaaagaggcaggcatgatctcacagtgttcactctgtatcacccattcgccgatccacacggtagagtactacaccaatatggcgttagaacttatcaagctgggggcggacgagatttgcatcaaagacatggcaggtatcggtcgccccgtttcattgggcaagatcgtggccaatatcaaagcggcacatcctgaaattcctattcagtatcatagtcatgccggtcccggtttcaacatggcaagcatcctcgaagtatgcgaagccggttgcgactacattgacgtaggtatggaaccgctttcatggggtacgggacacgccgatcttctcagcgtacaggctatgctgaaagatgccggatatcaggtaccggaaatcaatatggaagcctacatgaaagtgcgtgcgctgattcaggaatttatggatgacttcctcggcttgtatatcagcccgaagaaccgtctgatgaactcgctgctgatcggtccgggacttcctggcggtatgatgggtagtctgatggctgacctcgaatcgaatctggaatctatcaacaagtataaagccaaacataacctgccgtttatgacacaggatcagctgctgatcaagctattcaacgaagtggcgtatgtatggccccgcgtcggttatcctccattggtaactccgttcagccagtacgtgaagaaccttgccatgatgaatgtgatggcaatggagaaaggcaaggaacgctggggaatgattgccgacgatatctgggatatgctgctaggtaaagcaggacgcctgccgggtacactggctcccgaaatcatcgagaaagccgaacgtgaaggacgtaaattcttcgaaggtaatccgcaggacaattaccccgactcactcgacaagtatcgcaagctgatgaaggaaaacaaatgggaagtgggagaggacgacgaagaactcttcgaatatgccatgcatccggctcagtatgaggcttacaagagtggaaaagcgaaggaagacttcctggcagacgtggcaaaacgtcgtgcagagaaagataaatcgccggaagaagatgcaaaaccaaaaacactgactgtacaggtggacggacaggcttatcgtgtgacggtagcatacggagatgccgaactgcttgctgcacctgtagctgcagctccggcaggagagggcaaagatgttctttctccgctggaaggtaaattcttcctggtgaagaatgcgcaggaatctgccttgaaagttggcgatgcggtgaaagagggcgatgtgctttgttatgtggaagcaatgaagacttacaacgctatccgtgccgaatttagcggtacgataactgctatctgcgctaatccgggagacactgtttcagaagatgatgtattaatgaagataggataatgaacgagatatttgagaacttatatgacatgactgcgttcagcaatatcattgccgaaccgcagtttctgataatgtatgccatcgcgttcgtcctgctttatctgggtatcaagaaacagtacgaaccgttgctgcttgttccgattgctttcggtgtgttgcttgccaacttccccggaggagatatgggagtgatacaggcagacgagaatggtatggtgatgataaacggtgtgatgaagaatatctgggaaatgcctttgcatgacattgcgcatgaactgggaattatgaacttcatctattatatgctgatcaagaccggtttcctgcctccgatcatctttatgggggtcggtgcgttgacggacttcggaccgatgttgcgtaatctgcatctttccatctttggagctgctgcacagttaggtatctttactgttctgttggtagccatcctgatgggattcactccgcaagaagctgcttcactgggtattatcggtggtgcggacggaccgacagccatctttacaacgatcaagctggctccgcatttgctgggtccgatcgctattgccgcttattcttatatggcactggtgcctgtgatcattccgttggtagtgaagctgttctgtactaagaaagaactgagcatcaacatgaaggaacaggaaaagaaatatccttcgaagacggaaatcaagaatctgcgtgtactgaagattattttcccgattgtagtgactacgattgtagctctcttcgtcccaagtgcagtacctttgatcggtatgctgatgttcggtaatctggtgaaagaaatcggaagcaatactttccgtctgttcgacgctgcttccaacagtatcatgaatgctgctactatcttcctcggactttcggtaggtgcaaccatgacggctgaagccttcttgaactggacgacaatcggtattgtcatcggtggtttccttgcatttgctctttctattaccggtggtatcttctttgtgaagttagtgaatctattctccaagaagaagattaatccgctgatcggagcgaccggactgagcgctgttccgatggcaagccgtgtggcgaatgagattgcgttgaaatacgatccgaagaatcatgtattgcagtattgtatggcaagtaacatctcaggggtaatcggctcggcagtagctgcgggtgtactgatctccttccttgcataataaaaagaacaaccaataaaaattaggcacggattacgcggataaacacggtttttagttactcaactcttaaaaccgtgaaatccgtgtcatccgtgcctaattttgtttttatctattcgctggtcaccttcttgtattcagccacagccatcttctctgccagataagcattgatcagattggtgtgtgcttgcgtccatgacaactgggcggaaagtacatctaccatgctcgcttttccttcattgtaggagaaagtggccagatccagattctcatttgccagactcatgttttctttcgctgttttcacctgagattctgtttccgtcagtttggtgagagctgccgacagttcttcgttgatattgtccgtcatataactctgttgcaacttttgtattccgatatatgccttctgctgtcggttcgtcttgaaacgggctccccagcggaaaatgggaatattcagattgactcctacgatgggattaaaagatacgtcgtatcccaagttgggtgtggccgttgcccagccaccgctgaaatacatgtttaattggggattgaactggctgagagccgctttacgttgtgcctggctcttcatgatgtttacttccgtactggcataatcggcacgtcgttgcaaaacatcttccagaggcagtatccggacaggagcggagatcattccgatgttgtacaggctgtctacaggagtattcggtgcttctcccatcagaatattcagttgttgcagcgctaatgtataattctggcgggctttgatatactgcagttccgcttctttcagccgggtggaaatcatcagaagatctgtacggctgatcattccgtcatcgaaacggtcctgaataatgtcatattgctgtttgacaatgctctggtatttgtcggccgcttgtagcatggcttttgaagcggaggcattccagtagacagcatcactttgatagtgaatctggtctaacgtgagttcctcgttcagttggttcagcttttcgtctgccttcgctatctgatgttgggcattgagcgcaccgcctgtgtagagtggctgtgatacgacaaatactccctggtaggtatggttgcggtattcgcccaccggttcgttccatgcgctaaggtcgctcatgttcagggtaccgtctgcatttacgtcgattttcggcaggaaacctgtatgggctatctttcgcgcctccgaactggccaatgtctttagtttttgttgtttcaatatctggctgtaagcctccactttttcgcggtaggcgtcctgactcaggcagggctgttgcgcccaggctgtggagccaaggagcaacagtgaaaatagtatgagttgggttttcatttctttcatggataatctttttagttgacaattgacagttgacaattgacaattgtcagttgatggttattgttctcctttgatccggtggatggcgcaataggctacaggaaggacgaatagtgtcaatgccgaggctactaacagtccgcccatgatggtggcggccattccgccgaacatggcgtcgaacagtagcggcaacatacccagaatcgttgttccggaggccatcgctaccggaatgatgcgactggtcgtggcactgatgactgcgtccagcggttttttgcctgctgctgtttccaaatcgatttggtctaccagtacgatagcgttcttgatgttcataccaatcagacctagcagacccaatatggagaagaagtcgaacgacttgccgagtacgagcagtcccaacacgataccgatgaagatcagcggcagcattaacaggatgacggtcggcttgcgatacgtcttgaacaagaagagcagcgtcacaaacatcaggaagaatgtcagcggtaagtttttggccagcgcttcattcgattccacctgactttcctgttcaccgaaatacttcatggtatatccttccggtatttttatctcttgctgtacttgcgaccatacctggttgaaagcggaaatcgcattggtcccgcgacgcgggtcgcattgtgccatcatcaccatctgccggttatagtctttcacgttcgagaaccggtactggaagtcaaatttagatactacctgttccaggctggtcgtctcgttgcctgtcccgaatacgggcagtgtgcgcagatcattgatccggaatgaatccagctggttatttttcaataggataggaagtacctgatctccctgccggtattctcccaaagtcattcccgtggtaccgatctgaatgctctgtgccattccctgtcgggatacacccagcggttgtgcccgttccgggctgtaaaccggtttccagacgggtatcttgtttccccacgaattgcggatattaattaaatccggattctggtgcataatggctattgcctgattggtaagtgatacaagcgtatccacattcggaccgataaagccgatttcgatagccgcatccactgcgggggacagtttgaacaagctggtccgtgtgattgcactcggataattggctttcatatatccgtcaaaatcttcttcgtattctttcgtatatttactgtctgtcagttcgacgagtacattggcaaaattcggtttcggacctacggaagtggaggcaaggtaataccttagcggggtgctgccgaatgtgatggataccttttttacttccggctgcttcgccaggtgctcttctaccgatttcatctctttcactacgtcattgatgctgtatccgtccggatagaatacatccgcccggaaataaggcttatcgagcgacgggaagaagttctgcggcatcgttcccataataatgagcgagatgatgaagaggatcaccatggataccagtgtcactgctttcttgcggatcaatactccgagaacggaagcgaacttatgatagaacggcttgtcgtatggatctttcgtgctgtcgcctgttttggctttcagaatgaaatttccgaatacggtagtctgcgtcagggcaagtacccagctcattcctagtgaaatggcaagtaccacaaacagcggttttacgatttccgctacagcagagggagcaaggtaaagcggcaggaaggagcagatggcaatgaaagttgctccgagcaagccccattgtggtccggttgctccgtctatcagggctttccgtcggtttatacctcgggcaatggctatttgggcgttgtccgtcactacgatggcgttgtccaccagcatacccatggcgatgataaatcctgccagggacgttctgttgagtccgacgccgaagaaagacatgatgagcagtgtacctccgatagagaaaatcagcgaagagccgatgagcagaccggcacggagtcccatcaccagcatgataatgacaatcacgatcaggatggattcgatcaggttgatgataaatccgttgttggcttcgttggcgatctcgttttcgaggtagaggctttgcagttccagtcccacaggcatgagggggaggagctcgttcagttttacttttacgttctcacccgtctgcactacatctctttgcgggtcggtggaaacaccgatgccgatagcccgtttcccgttcacatgcatgatgttggatggagggtcgagataacctttctcgatcacggctatgtcgcccagtttcacctgtccggctttggtggtgattacctggttgcggatatcgtctatgttggcatacattccgttggctgttacccgtaactgctgtacgcctgcacggatttctccggtgttgataatctggttctgcgattgcagaaggttggccagctgtttgggatcgattcccattcccaccagtttgttggtagaaacgaagatgttgactacttccgtctgtacgccgaacagtgctactttcatcacgccgtctgctgtgacaacctgcgtcttgatcctttccgcccagttacgcatttcctcataagtgaagccgtcatctgccgtcagtccataataaatgccgaatacgtcgccgaaatcatcggagacggtcggggtggaagcaccgctgggcagctgcggctgaatattgagcactttgcgtcgcagttcgtcccatttctgagggatggaactggcggaaagtgagggttgcagttcgaacgtgattttggagagcccgtacatggactctgattttatcttgtacacgccgctcatactttgtatctcacgggagataggctctgtgatcagccgttctacttctgccggttcggctcccggatagcgtgtcatgatgaccgctgatttgataacgaagggggcatcttctttcttgcccagctttccgaaggaggtaatacctccaatcagcagtacggcaaggaagaaatagatgatcttcgtgttatccagtgaatattttgctaagttcatttgtctattgatttaatactttctccttctaccaactggtatactcctgctatgacgatttgttctccgggtttcagtccttcggacacgagtacttgcgcctctcctgtgggggcattgacgacgattttgcgtttgtgcactttgttgtcctctactacccagacatacatgttgtttccgtcactttcgccgaaaacagcactgagcgggatgattgtccagctatcctgcaccagtgggcctacatcggctgtgaaacggatgctgcaagtgaagccgggcttcacggcatataagtcccggtcgaatgaagggtcgtcgatagtgatgctgaccggaatacccgttccttcggtggatatgtccagatattcctccagtctcgccttgaacacatggcccttgaaggtatcaaactctacaaggaaacggggatctttggcacggaggagataaagatatgcatccggtatggtgaacttgatacgcaggttctgtgtgttgaccagttgtacgatcccttctcctgaattgacacgctggtagttctccaccagccgcttctcgatagaaccgtcgaaaggggccgtcagtttggtgtcacgcatgttgttgctggacagttcgtactccgattttgctttctgataattggaaaggctgatttcatactcctgcacggagatcgcttgccgggagagcaggcgcttgttgcgttccacttgtgcggaagccgtttcgtaggcagacttggtggcagcatactgcaatgcgatatctctgggatcgatagctgcaatcagttgcccttttttcactttctctccttcgataacaggcaggctgatgatctgtccgctgacgcggaatgccagtttgacatactccactgcttctacaatgccggagaagtcttttctgattactgaccttgattcgacaatagttgtcttaacaggtcgggtggcgggtgccgtcatctcttttttttgcccgcagccttgaaataggatggctgcgagtgcaatcacatagatatttttcataagtcgttcattgtttgggaagtaaacaatttgatacttgactatgttcagtagagacgggtatattagaaatgtgaaattagtatcaacattaaaggaaaatgattgtttatagataaaaaatgccttttctgttgattttatcagagattattcccacttttgcaccgcactagtattacagtcgcggaatgcgatatgagaatttaattctcgaatttaagctacgagcatgtgggaatatgctcgtggcttccttagatatacggttctgtcccccgtgtggagcgttaatgcgcccactgtatctcatccctcgtggactgtaatatgtagtgcaacgggtcagcaggaccgtcttttttgcctgctgaatattattatatataataggaagtatttctcctgaatagtactatttaataaaccatcatttttcaggagatcagacaatataatggtatggtatattcccttaactataccatttttatattacctggtaatagttccccttagccagttaatatacggaccgcactactctgtgaagaatggtgcggtcctttagtttatctatgaaacgaaaaagaggaaatttccaaccggaaatctcctcttttttcatcttaacgaaagattgaattatttcttcttacggtcaccgtaacggctcatgaacttatcaacgcgacctgcagtatctaccaatgtagatttacctgtatagaacgggtgagaagtgttagagatttcaatcttcagcaacggataagtttcaccttcgaattcgatggtttctttagttgctacagttgatttagacaaaaacatatcaccatttgacatatctttgaatactaccggacggtatgattctggatgaaggccttttttcatttcagtatctgtttttttaatttatattctgttactattttggtaagaaatagtgtaatggtcattttcagagcgcaaagatagcacatttctccggaatagaaaaaactttgctgaaaaaacttctgtgaattatgctatttctatgaattatatgattggcacgaaaagaatgtcttgtgctttttatggtataatacctgttttgggatagaacctttcagccgtttatttgctaggtggacattacaatctaatgtcagacccgcttacggatgaatatttgctgatcgatttaaacctttttctattatatttttctttccgatgctcgttattcggtggataatgcttacttttgcgtagaattttaattcactaacaataaactttaaacaaaatggttaattacaaagacttaggattggtaaacacaagagacatgtttgctaaggctattaagggtggatacgctatcccagcattcaacttcaacaatatggaacagatgcaggctatcatcaaggctgcagtagaaacaaaatctccggtgattcttcaggtttctaaaggtgctcgtcagtatgctaacgctactttgttgcgttacatggctcagggtgctgtagagtacgcaaaagaattaggttgcgcacatcctgaaatcgttcttcaccttgaccacggagatacttttgaaacttgcaaatcttgcatcgattcaggtttctcttcagttatgatcgacggttctcatcttccttacgaagaaaacgttgctttgactaagaaggtggttgaatacgctcatcagttcgacgtaacagttgaaggtgaacttggtgtattggcaggtgtagaagatgaagtttcttctgaccaccacacatacactgaccctgaagaagtaatcgatttcgctactcgtacaggttgtgactcattggctatctctatcggtacttctcacggtgcttacaagtttactccggaacagtgccacatcgatccggctaccggtcgtatggttcctcctccattggctttcgaagtattggatgctgtaatggaaaaacttccgggattccctatcgtacttcacggatcatcttcagttcctgaagaagaagttgaaacaatcaacaagtttggtggtgctctgaaagctgctatcggtattcctgaagaagaattgcgtaaagctgccaagtctgctgtttgcaaaatcaacatcgactcagactctcgtctggctatgactgctgctatccgtaagactttcgctgaaaaaccagctgaattcgacccacgtaagtatcttggtccggctcgtgacaacatggaaaaactgtacaagcacaaaatccttaatgtgctgggttcagacaacaaattggctgaataatcacagattatcctattatatagaaaggctgcaatcgtttgacggttgcagcctttttacgtaatattctctatctgcttattccggtttctgagcgggcacatttcctcccaagaagaaatcttctatcttttgcttactttgaatgtctttcagccagttagctgcagcattataataattcttagtgcctaaaacgagttcgcctcgttcgtttagtttcgcttcttcttccttatcttctttcgggcgtgtttttaagaatgcttccagacagcgttcggtgtttttcttgtctttcagcgaatagaaataaatgaaagccatatcatagagcagcttatgattttgtttatcgtatttccggtagcgttctctgatcgattcaatctgctctttaggcatctgtgccattttgtagcagtcggtcatgccaatatagagccgtaccatattactgtctttgggaatagtcagatcaagcgctttttcgagatactctacgcctaacttcttccatgaagtcttggcgcaggcacggccgagataataaagcaggtttacgttttcaggatcatgttttcgggcggcttccagaaagtcatgtgcttcgtaatatttctcttccgcataatagctgatacccagataataacaggtatgaaaagaactgtcgccctggctcaccaggtattcataacgctggatagcggtaggataatccttattcagacaatatgccagtgcattctggcggttgacagcgatgttggtggtgtcaatctgccgatatttctccgtggcttcaattgcttcgttgaaataagaaccggctatgttcagtgcggcgagcttggcggcggcaagatagtcgtcggggtatttctcctgtatattatagtagcaccccgtggcggggagaagctctcccataccttcgaaactttgggcctgcagatgcaaggcgatggcggaactgtctttctctgtcatcagactactttctcctaaagcatcctgaaacttctgtaaagagagcagtagtccgatgtattgaatacgcacatatttgttttccggattcagatcgagtgcctgttcataatatttcagtgcctgttggtatttggccaatgaacggcagcattcggctgcttcgatatatgcacgggtattggcagtgtcattggttatgatttcctgataagtggaaagtgcttctgtattcatcccaagtccccgttgtgctttacctttttgcaagagtaggggaattgtcggcttttctttggcaatgagagtgagagctgcctcgtaatcgtagtttgctattgcttcctgaacatgattgatgcgctgcgccatcaccagggtggtggtacaaaggaaggcgaggagaataatccgtttcataaatatttattttagtgtgtcgtaacaaagacgcaagatgctaaaaaatatcgtatttacgaattattcgtagcctttttggaatagattaacggaatgataagagaagataacataatgataagtgcggatattgcatctaaaacagcaatatccgcacctaatattttgtcccggcattccgaatggaagcctgacaggggcaccttgtccctacattaagaatcctaacaggataccggcagcaacagctgaaccgattacacctgctacgttcggacccatagcgtgcatcagcaagtagttggttggatcatattccagaccgacaacttgtgagatacgtgcagagtcgggaacggcagatacacctgcattaccgatcaacggattgatcttattgcccttcttgaggaagaggttgaagatcttaacgaagatcacacctgatgcggtagcaatgataaatgacagtgcaccgagggcaaagatcttgatggagtcgagtgtcaggaactcggaagcctgagtagaggcacctacggtcaaacctaacaggatagtgattgtgtcaatcagtggaccgctggctgtgttagccagacgacgggttacaccactttctttcaacaggttaccgaagaacagcatacccaacagaggcagaccggaaggaaccaggaagcaggtcagcaacagaccgataatcgggaaaatcactttctctgtatgagaaacggcacgtggcggtttcatacggataacgcgttcgtgcttggtggtgagcagacgcatgataggcggctgtatcaccggaactaacgccatataagagtaggcggataccgcaatggctcccattaagttaggtgccagcttggacgaaaggaagatagccgtcggaccatctgctccaccgatgataccgatagcaccggcctgcatcgggtcaaatcccatttccaatgcgatcatgtatgcaccgaagataccaaactgggcagctgcaccgatcagcatcagcttcggattggagatcagcgccgagaagtctgtcatggcaccgatacctaagaagatgagcggtggataccagccggacgttactccctgatacaatatgttcaatacagaaccttcttcatatataccgacttttagtccggcgtccatattgaagggtatattaccgatcaggataccgaatccgataggaattaacaacatcggctcgaactctttggctacagccaaatagatgaagaacaagccaacgaggatcatcacgatatgaccaactgtcgcgttggcaaatcccgtgtaggtccagaagtcggcaaggttatttcctaaaaagttaataaaatctcccatattattcaataattacgaggtcattaccttcaagaacagaatctcccttgttgacattgatagcagtcactttgccgtctttgtctgcattgatattgttttccatcttcatggcttccaatataatgatagtctgtcctcttttcactgtatcacctacatttactttgatgtcaaggataacgcctggtagcggggacttaacgcctgatttgcctgtagaaggagcagccggttttactaccggtgtggtaggagcagccggtgagttaggcataggacgtactactaccggtttgggagcagttttcggttgtttctccatttctactttgtagtgcgtaccgttcacttctacatgagcgatattatcttcaatatctccgatggttactttgtatgagttaccgttgattttatatttatattctttcatcgttttatctttttagggaatgatttactttctgttaggattttcacgcaaggtgtaaatcttcgaactccacggtgaataactgcgtttcacacgagtgatggtcagcaccgtttcttctacgtcgtgtacctcatcctgcatttcgtgtaatgccattgaaatagcagcataaacttcacccggagcctgtgaaagctctttcgcttcgactttatcgatgcctttagccttcatcgcattgcgtttgctcaggttgacagcaactttacctaccaccttgaaggcaatgaagagaagaatcaatccgcagaatactacgctcatggctgaaatagacataccgataccgactgagtcatgttcttcgaacttttccatcttggcattactgtcaagggttttgttgttcgtgctcggggttacgtatttgtctttgcttccgccttttacttcccagtctgctgctccgtcacttatgcgtgcataagactggttgggacctaaagttcctgctggtatgacaacttgatccagtagctttctgcctgaatcaaaaagaccgacccaattggctgtttcggggttcagtttgaagctggtatggaaggttccacgattaggttcgccatctgcccaaaataacgcatgttggcgtggctttactaatgtaagtatgtcacctttcgggataaaataggttactgtatcgcccggctggctgcttactttcaataaacaagctgctaagtctgcgctaccgtatgatttgttgaatatttcaatccatgcactgtgcaagccgtagtcatcctgaaagttgttttgattgtctatcaggacttcattcagcaatagcttattgttcgacttttgctctccgcaggaagtcaatccaatcagcaacagcagagaaaggaatattccgattttggttttgttcataatcgttcttgttttaatgtgaaaagttggattacaacggaatattaccatgtttcttcgccgggttagacagtttcttagtctgcaactgctgcaaagcacggatcacgcggaaacgtgtgttacgcggttcgatgacatcatcgatgtaaccatacttagctgcattataagggttggcaaacagttttgtatattctgcttctttttcggcaaggaactgagccggattttcctggtctttggcttcacgcgcgtacaatacttctactgcacctgcaccacccattacagcgatttcagctgttggccaagcatagttcatgtcaccacgaagttgtttacaactcatcacgatgtgagaaccaccgtaagatttacgcaatgtgattgttactttaggtacagtagcttcaccgtaagcatacagcagtttggcaccatgaaggataacaccattgtattcctggcctgttcccggaaggaatcccggtacgtctaccaacgacacgatagggatattgaaagcatcgcagaaacgaacgaaacgtgcgcctttgcgagatgcgttgctgtcgagtacaccggcaaggaatttaggctgattggctacaatacctacagactgaccgttgaaacgggcaaaaccgataatgatattcttggcatagtctttctggatttccaggaattcaccgttgtccacgatagcgctgataacctcgtacatatcatacggtttgttggggctgtcggggataatatcgttcagtgaatcttccagacggtcgatcggatctgtgcaatccacatatggagcttcttcgaggttgttttgaggaatatagctcagaagtgtgcggatcaatgccagaccttcttcttctgttttggcagtgaaatgagtaacacccgatttggtagagtgaacgcttgctccgccgaggttttcctggcttacgtcttcaccggttacagttttcactactttcggacctgtaaggaacatataagaagtaccttccatcatcagtgtgaagtctgtcagtgccggagaataaacagcaccgccggcacaaggcccgaagataccggaaatctgcggaatgacacccgaagcgaggatattgcgctggaagatttctgcgtaacctgccaaagcgttaataccttcctggatacgtgcaccgcccgagtcattgataccgatacaaggagcacccatcttcattgcctgatccataatcttacagatcttcagtgacattgtttccgacagtgaacctgcagtaacggtaaagtcctgtgcaaaaagatatacgagacgaccttcgatagtaccgcaaccggttactacaccatcacccggatagtgctttttctccatgccgaagttcgtgcatctgtgctcaacgaacatgtccatttcttcgaagctaccttcatccaacagcatggctatacgctcacgcgctgtgtatttccctttttcatgttgcttcgcaattgctttttcgccgcctccgatgcgtgcaacggcacggcgttcaataagctctttaattttttcaagttgattactcatgagttcttgttgtttttttagagtttatgattagtgttcgcagagttctgtcagcacaccctgtgttgatttcgggtgaaggaaagcgatgtccagaccttcggcacctttgcggggagccttgtcaatcagacggatttctttgctttctgcttctgccaaagcattagctacgccatcttctacggcaaatgctacgtgatgaacacctgcacctttgttttcaataaatttagcaatggtgctttcggggcaagtcggctccaacaattcgatttttgtttcacctacctttaaaaaagcggttcttactttttgatcttctactgtttcgatgttgtaacatttcagacccaatacgttttcgtagtaaggaagggcttcttcgatgctttttacagcaatgcccagatgctcaatgtgtgaaatcttcataactatatttttttatatggtttaattatgtgcttatatggcataaaacagcacaaagaaagacatttcttgtctaataaagaaatatttctgcatttaattattggggaataaagcataaaaaatgctccggatgggtgacaaagacgggttttgtaatcttgagattacatttagacataaaacttgaccagaagattattcagccatggccagctgatacggaaccaacggcgggtactgctttgtttgcctccgaaacggagtacgaaatcacgataaccatgtttgcggaagggaagtcctacatccatgaactccatgtgacggaatccccgttcatgggcatcttcaagtgctttccatactgccagtatgccgggtgactgcagtgcatacgtctttcgcattcctcctgaaaaccagataaaagcattttcgccggaatagatgcagacggagccgccgataatcttttccttgtattttacgatgaatatttttgcctgttttcctctgataagcatgctgttcatgtggcggaaaaagtcattggcagggaaatatctccgtattcgtgaagaataaactttgtgcagcatccgcgagaattccttaatctcttccaccgtatgggcttctactactttggctccgtttttgagtcctttccggatctgacggatacgtgacgggctgaaacggtcttccgctttctgcgtactatgcagagagttacggacacgcagccagttgaccggaaaaaagtcgttctttcggaagaaacggtaaccgaacatggaattatccagattgcggaattcaataagaatgcaggtgcgtgatgcttcttgtgtgagatgctccagcatttcaccgaaaatttcttcctccttctctttacttgccggtagagaagtgtccagaaattcacctgcaccatataccacacattgtttgacaagagaggagggaagccactttttggtcttgcgtatggcggcaagcaggcgtgctacaggtctgccttcttctgttgccactatcagtagcggggtatatcccggagtcgattcatagatctgaaacaactccttggaatgaaaagtattggttcccggtaaatcaggaatgtcttttccgcgataatatgttgttagtttaagtggcatccaaatacaaatttacactttttattcttcattcaacaataaaaaagagaatttgttggcttagcctaaaatttgtctttttatcctttgcatatatttgaggaaaaaaaggcttggaaaagcgaatttttgtattattgtcgtcctttgtgagtacagaagtaaaatggaaacgtctatgtaaaagattgtgctaattgtattttactaaacaaaggaaaattaatattaactttaaattaaaacgaatgagagagaatgcatttgttgaagcgtggaagacacagcatagacgcgtttccatgattttagggctgactttattgtgtgccccttctgccatatctgtttatgcagaaaatggtgtgaatgatattactgtgcaagccgtcatgcagacaaagacagtgaaaggaactgttttagatgaaaatggagaaccgttgatcggtgtttctattgtggtgaaaggtacaagtacaggtacgataactgattttgacggtaagttctccattaatcttccggccggaagtaaagaactggttgtttcttatatcggatataaagaacaggctattattgtgagcggaaatgccccgctgaatataaagatggttccggatacacaggctttggatgaggtagtggtcatcggttacggtacggtaaagaaacgtgatttgacaggtgcggttgcttctgtgaaatcagaggatatcaccatgaatccgggcgtgaatccgatggatgcgctgcaaggtaaaattgcaggtctggatatcactaattcttcaggtcaggcaggttcgtcaccgacagttcagttgcgtggtacccgctctttgcagttggatgaggatggtaatatttcttccgatgcatttaagccgacttatattatcgatggtatgccgggtgatattgctaccttgaatcccaatgatattgaatctatcgaagtactgaaagatgcatcttctacggctatctacggttcaagtggtgcgaatggtgttattatcgtgactacgaaaggatccaagagtggaaaaccggtcatcaattttaatgcttatgccggaacgactatgggtgcccgagttcctaagatgcgtacgggtgactcatacattaattatataaaagattcttataagcctgtcggtactactaatgaggaggaaattttcggtgaaagatacgatgccatcaaaaacaaccaatgggtaaactggggagatgaagtattacactcaggtttgaagcagaattatagtatttccgttgccggaggtactgagaagacgaaagcctatttctcgttgaactatactgatgagaagagtatgtatgagaatgatgactataaagtgtactctacccgtgtccgtatagatcaggaaatcaataaatggatgaatgccggtattaatgttcaggcatctttctccaacaagaattcacgtaatgccgttttggaaagagcattgtttgccaccccgttaggtactccttataatgaagatggctctattacggaatttccgattcccggttcatcatcagatccaaatccgttagcagacgaacaagatggagtatataagaataatactaaagcaggaagggcttatgttgacgcttatcttgaatggaaaccggtaaaaggattgtctgtcaagtcacagcttggaggcagttattctcaatctcgtgccggtaaatttatgggagaaggctcttataatgtgttgaaaggcagtacggtggcatatggcgaagctaccaataagacaggatataattacaaatgggaaaacatagtaacttatcacaatacatttaataaggatcatgacctgacggttacaggggttacttcctggaattacaatcagagtgaagaatattatgtctatggtgaaaacccggcgaccaatgatatgttgtggtatgcattgcagaatgctgataataagaaactgaacagcaaatatctgatgtcgaaagggatgggctttatcggtcgtgtcaactactcatacaaaggtaaatacctgttctctgcttccagtcgttatgaagcggattcccgtttgtcgaaagacaatagatggaatttattcccggcagtttctgtaggctggagaatctcggatgaagcatttatggctggtacaaaaagccggttggataacttgaaactgcgtgtaggctatggtgttgccggaactactgccggtattgctgaatacagttctatggcatctttggaaaatgtgacaacctctttgggaggaatgactgttccgtcagccaagtttacggagtatatcactaaccgtaatctgacatgggaaaagactcatgacttgaatattggtattgacgccagcttcctcaataatcgtattgatctgacggtggatttgtatcggacaaaaacaacggatgtaattctttctcaggcattgccgacatctattatgggtaattacacaggtagcactacttataaaatgaacaagaatgctgctgaaacagaaaatcgcggtattgaacttgctcttaatacccgtaatattgtgaagaaagattttacttggagctcaacagtgacatttaccgccaacaaagaaaaaattaaatctttgatcgaagggcaggatatgatgttcaatgcaaaaaagggtgatatggtgttcaaagtcggcgaaggagtcggttctttctatagatataaagtgttgggtatctggcaatatagcgaaaaggaaactgctgctttgttcggatgcgaaccgggcgatattaagctggatttacctagtgtgaagaaggacggaaatggttattattatatgaatcctgaaggagagcgcgttgatattacggcagaaaatccttatggtgtacgtgcggattatgatcgtcaggtaataggtcgtaatactccggactggacattgggctttaagaataatttcagatacaaagattttgatttgtctgtcttcctttatgcacgttgggggcaaatgatgaactatggtagtgtgataggtaaatattcgcctaacccggattacaatattcctacttattttacttactatgacaagacgatcgaagcagatcaggatgtcttgttctatgctatcgataaatccaaggatagaagtgcttatgaaggatatgattcgatgtattatgtggatggatcattctttaaacttaaaaacgtaacattgggttatacgttacccggtaaacttacaaaacgttttggtatcagtaatctgagagtttatgcgacaatgaccaacctgtttacttattcgccaaacaaatatgtgaagaattacgatccggaaatgaacggaagcatcaacttcccattgtctcgtgattgcatatttggtcttaatttaactttctaaaaaatagcaatatgaaaaagatatatagtttagttctacttgttgccggtgttttttcttggggctcttgcagccttgatgaagtgaaccccaacaactcgggtcagttctccgatggttcttatacattggaaacttataaggcattcaccaactcgtgctatacagctttgatcaacaacatctatcagagtagtgactatctggtttgtacggaagcgggtactgatatttgggaagaacctaaatcgggttccagctatcagcgttatcatagttataacggtatgaaaaccgatgatagctattattataaagtgtggcaatattcttatctgtgtatcaacagctgtaatattgtgattgacggagctgagaatgtgacaggggatgagactgaaattaatgaatgtgtggcacaggccagatgtctgcgtgcttactattatatgaatctggtggagcagtttggaaatgtcgatttgcagttgaaggctgccgatagcgagaatatttcttttgatgctcaccgttctaccgttcccgaaatttatgctgccattatcgaagacctgaagtttgccgtagagaatctgcctgtaagtttcagtgattactatagccgcgttacaaagaaatcggcgatgggattattggcacgtgcatatattaatggtgccggttatgatctgaaagataccgatggtgtcagcttcctggaaaaagcctatgatacggcgacaaccatgattaataataaagcgatttatgagtggtatatgcatcccgcttttgccgatgtattcaacgaaaataataatcgtaacaatgaagaagctctgttcatagctgcgggtgccgaaagaaattcggacgcttacaccaatggtaactactcacaaagtgaaatgttccgtcacttcttaccttcgttgggaacatatacggacctgggtttggtcgacaagacttcaaacttcgtatacggtcgtccgaacagtaatatcttcctgccatccaaatatctgatggactgttttgctgctgatatgaacgactctcgttttcgttattcatttatctcagcttactcgtcttattctataccggcatggggggcgacttatgaatatggaggttcagcgtgtgccaaagaaatcacaagcacacttgctactaaatttggtattcccgcatctaatataggtaagaaagtttatcctcattttaacttggaatccaatagtacagccgatgctaattactgccagctggctatctggaatgcagatggaacagcgaagactactcaggataaaacagatggtaatattcttcatcctgctatgcctttagatccggcagaagctcatcaatatgccgtttattgttctttgaagacgctgacagaagaggaaaaagctcaatatccggggttggttcttaatgttttcgatctttacgatgagaatggaacagccagggctacctatgacaagcctagtgctgccagtgctttgtggttatctatttatccggctctttctaaattcaatatgccgggtaataagtttgtcggcagagacgttcagagaaaaactgtggatgtgatgatcatgcgtatggcagaagtttacctgattgctgctgaagcatcggtacgcttgaacaagggagatgctgccaaatatattaatgtactccgtacgcgtgccggtgccggtacggtcagtgagtcgcaagtggatctgaattatgttttcgatgaatatgcccgtgaactttgtggcgaatgtggccgctggtatttgctgaaacgtaatgctgcttttgagactcgtttggctgcttataataagcgtgctgccgagcactttaagaaagaattctatttgcgtcctattcctacgaaatatctggatgcgatcaataatccggcagaattcggacaaaacgccggttattaatcagttaattaataatcaagcataattaataggagccgggcaggagatttctcttgtccggctctttgtttccagacctgtatcctacgtaaaagtttaaaaaggatttccggtatattttcattatttcctgatacagccttttattattttctttatttttgtgtgtccaaacaaaatagcgctatgatagaagaaatgcttgcttataatagagagttcgttaagaacgagggatataaagaatatataacgaataagtatcccgataaaaagattgctatcttatcctgtatggatacacgcctgacagctttactcccggccgcactaggcattaagaacggagacgttaaaatgatcaagaatgcaggaggcgtcatttcccatcctttcggtagtgtgattcgcagtctgcttgtcgctatcttcgagttaggtgtggaggaaataatggtgattgcccattctgattgtggagcctgccatatgcacagtgaagaaatgcttgagaagatgaaggcacggggtattaatgccgattatattcatatgatgagtttttgtggagtcgattttcattcttggctagatggctttgaagatacggagaagtcggtaaggggaacggtcgattttatagttcatcatcctttgattccgtcggacgtgaaagtgcacgggtttatcatagactccactactggagaactgacgcgaattgtataggaaatcgccctttctgcctatcaggaactgcataaaacatggtgtcactatcgcaacaggatagtgtcactatcactgtctcatggtgtcactatgtcattgggataccgacactatcccaaatgaaaaaaataaggcagctttttatcggctgcctttatctttctgcggttatatactttctttgactcatgcactcgtttgtaacaaacggggtgtccgtgctctttgatttctgcctcacggctggctttacgattcgctttgatgtaatcgtcttgtgtaattcgttttttcataatgaatatatttctcagtgcaaagatacaatttcatttcttattacgatcggtttgcgctatctttgcatacataaatcaaatgaaaacggaaataatatggaaaatttcagtgaactgataaagaatcgccgcagtatgcgcaaatttacggatgaggagttaacacaggatgaggttgtggcactgatgaaagctgccttaatgtctcccagttccaaacgtagtaatagctggcagtttgtggtagtcgatgataaagaaaagttgaaagaactgtctcactgcaaagaacaggcttcttctttcattgcagacgctgctttggcgattgtcgtgatggcagatccattggcgagcgatgtctggattgaagatgcttctattgcttccatcatgatacagttgcaggcggaagatttggggctgggaagctgttgggtacaggttcgcgaacgtttcactgcaaccggaatgccgtctgacgagtttgttcatggaattttggatattcctttgcaactgcagattctttccgtgattgccatcggacataagggaatggaacgtaagcctttcaacgaagaacacctccagtgggagaaaattcatattaataagttcggaggaaaataacgatgggagctgtcaaagcaaataataataaagatacttataaggctactgccgtcgcttttattgttatcggaactcttttcctgataaataaactgctcccctttgcttctataggtttgccttgggtgatgaataaggacaatttgttgttgtatgcctctatcagttttcttattttcaagcgtgacaagtcggtcggctttgtgctgttgggactgtggctggtaatgaatatcggtttggtaatgtcattgctcggttccttgtccggttatctgttgccattggcactgttgatcatcggaattattttattttgggtttcaaaacgttaaagaaacaatgaaaagaagtattgaagatacgcccgttgtgtttctcggtgccggaaatctggcaactaatctggcgaaagcgctttaccggaaaggattccgtatcatgcaggtgtacagccgaacggaagaatcggctcgtacgttagccaatgaagtggaagcggaatatatcactgatttaaaagacgtatcgaatgaagcgagattatatattatttcattgaaagatgccgctttcgtcgaactgttgcctcagatcactgatgggaagcagcatgcgctgctggtacatacggcaggtagcatcccgatgaatatttgggaaggtcatgcggaacgctacggagtattttatccgatgcagacgttcagcaaacaacgtgaagttgattttcgagaagtacctttctttattgaggcaaaaagaccggaagatgccgagctgctgaaagcggttgccggtacgctctctgataaggtgtacgaagccgattcggagcaacgcagaagtcttcatctggcagctgtctttacctgtaactttaccaaccatatgtatgctcttgccgccgaattgctggaaaaatatcatttgccatttgatgtcatgcttcccctgattgacgaaacggcacgcaaagtgcatgaactcgctcctcgtgatgcgcagaccggaccggctgtacgctatgacgagaatgtgatgaataagcatctttctatgctggcagacagtcaggcattgcaggaaatttataaattaatgagtaaaagtatccatgagcaccatcaattatgatctatcccgcatcaaagcactggcttttgatgttgacggagtattgagttcgacaacagtcccgttgcatccttctggagaaccgatgcgtacagtgaatatcaaagacggttatgccattcagctggcggtaaagaaaggactccacattgctatcattaccggcggacggacagaagcggtacgtatccgctttgctgcattgggtgtgaaggatctgtatatgggttctgcggtgaaaattcatgattaccgtgatttccgtgataaatacggtctgtctgatgacgaaattctgtatatgggcgatgatgtgcctgatatagaagtgatgcgtgagtgcgggttgccttgttgtcccaaagatgcagttccggaagttaagtcggttgcaaagtatatatcttatgtcgatggcggtcgtggctgtggacgtgatgtggtggaacaagtattgaaagctcatggcaagtggatggcggaagatgctttcggctggtgagttgtaaatcactaaatgataaataaaactatgcttggaaatttagataaatatcagattatattagcctccaattctccccgccggaaagaactgatgtcaggcttgggagtggattatgtggtcaggacattgccggatgtggatgaatcatatccagccgatctggctggtgctgcgattccggaatatatctcccgcgaaaaggcggatgcttaccggagtattatgcaaccgggggaactgttgattacggcagatacgattgtctggctcgatggtaaagtgcttggaaaaccggaaggtcgagaaggggcggttgaaatgctccgttctttgtccggtaagtcacatcaggtgttcaccggtgtttgtcttacgactactgaatggcaaaagagctttactgctgcatccgatgtggaatttgatgttttgtccgaagaggaaatccggtattatgtggacaaatatcagcctatggataaagcgggagcgtatggagtgcaggaatggatcggatatataggggtaaagtctatttcgggcagcttctataatataatgggactccccatacagaaactgtacggggagctgaagaagttataataaatccagcattaacgggatgtcctcttcttgaataccttgtttgagaagagcttccttgtctttccgaaacatctccagaaagcgttcacggtttccgttggctgtgattgacttgccgtacagggcggccgctttctgaatgtctcccattgtccatgcgacgtgtccggcattcatatagtcgatagccagtggcttctgttcaatgattttttcgtaatatttcatggcttgttcgtatttccggctgatgaatgaacaccacccgatgccgcgccatgcttttatgcaattactttcgatgaaatccagtttgaaaaagtagttggcagcttcttcgtattgtccgagttcggccaggcaactgccgatatggaaaataacattggtatcttccggtgtagcttcttccacctttttataatagctcaatgcagcctgataatttcggtttaaccggtaacagatagccagatggcggttgttccagatgttatccggtttcagtgtatccgctttcagataagcatcgatcgcttctgcatacttcttgtttttttgcagagcatatcccagtttctgataatattctgcacctcttccctgaagtgctccgatcgtttccatttcctcgtacacttctattgcctcattccagcgttctttctttaaatagaaatctgcgatcgggaataggatatcttcactatataatacgttactaagtgcaggaatgtggtgtaaatcgagtttctccttaaagatgtccctaaactcgtggcggcgtacactgagcttgaagaaacggtacaggtcatgcagatattgattgctgacggttcccggtcgctcattgaatttcttcattgtttccgcactcgacttttcggacagctctgccacttgctgttcaccgagctggcttagcatcatgtcttgctgtgcctttggcaactgccggatcgtaaagaagagtgaatacttatcactgttactgaaaaatcctgattgaagaattaaatccagcaatgtatttttctcgttaccttcctgtttcagttgcttgatgacatcggattgctgcttgctgaacgggtaaaaccaattctgtacttcccggaagaacggataacttttcagtgctgcaaatgtactcatatatacgtcggctccttccagttgcagctcattcatttcgcgcaacttgtctcccagtcctgattgttcgaaagcgtccgcccaatccggattcttgtcatcgttctcatcctcattctcctcaaagccgaatctcatgttccgcatggacgaaacattcttcaacatttcaggaataatttcctctctcattttcttgtctatcttttctgtttcctggcatagtagcatttggcgatagatacgtgccacatcctctttgaatggaggaatctcatccatgaggtcgactctcttgaccagatcgttgtagagtgagagacggttcctgtagatatggaaaatgaaaatgacacctaccagtgcacgttgaccggcattgacatccggatggcggtaagcatccagcaaccacatgattttacgcaggtcaaaacattccatcagacttaatgtgacagcactgataaacaggcacagatcattcaccggaagaagttcggaggtaagcatggattgtgcatcctcttcctcttcgggagtccatgcactgttggtccatgtttgcagaaacatatatttaagtgtttcttcatgccgtttcagtacctcgtccatcttttcgtcagacagcagtccactgactgccaagtcgtcattgaatgactccagcatgtgcagcaattttttgagtgtatatgctgacagactttccggtcggggagtgcggcgtacctcatgataatatcttgatgaagcattgtccagcataagcaggcgcgaacggtcggctatttcccaggtatcagctacgagttttctgtatacattccagcgttctgggtcgtttgcgccttggcgcatatactccagcatatacttgtaggaggtttgcagctgctccaagcgggtacgtaaatcccagtccggacattgccaaagcagggattccaactgcatcaaagcttctttaagtcttttttcttcaagcagagagcgtatataggtgtattgttcattaatcgttttttcattcataatggttcaattatttataggtaatagaacaaaaaggatgccaaaaagttagaatctgacttgcacctgtgcttgtatcagattagaatccttttgtccgtctccttttttatcacaaaaagtgtattgtgcctgcacacggcatctgggataaaaccagtattgcagtccggcaatgtaattattttgtttgaaatctgccgctttgttcggattgaaataatcgaaagaggcgataaagtcgaaattttgtaataaacgtacgctgcctgtcgcatagaatccttcgctttttacgtttctgtcttttcctgcaagatattccgtacggaagttgaatgcggaagtggtaacaacccctcccaggctccagcgtttcttggcgtaattttctcctgttttgattcccgaatattgggagtcacctatggcgtgtccggttccccgaatgaaagatcctcctacagacagccatttgttaggatacaccatcaggttgccgactacatctttctgactgtttttgtctttggtgtttaatccctgtccgttcatgacggcaaatttgtattgcaggagatcatgaaatagttttccgtgaatcatcataccgatgtctcgtccggaagtcattccataacatttgtcactgccgctgactcctgccagataacagactgactgagaatagcagttgatcagctctaccgttgtgggagacagttcgttttcaatggtgtaaggaactttaaattctccgatacgtgctgtaagtccggagaggatccggtagtctgtatatacttcgagcagcataccaccgttgtagaaatcatacatgaaatcgcatgtccatctgtcggtgattttaccgtgtgccatgaagatgatccgtttgatgtcgaatgtattgtcgggattggcggcatcgtcgtatgtataccccagttgtgcataaccggcaagactgattcgttctttcagtgtattgactacttgattcaacggcgttttctcctgtgcggtgagcgtattctgcatactaagcagggtgaacgcgatcattgagagtcgaaagagtgtttttcgcatgtgattagttgttatttgattgttgttgaatttgtttttgtaaaagttgtatctatcagatttttgtatccggaatatgtctgagatatccggttatttgttttcagccatgttactgctttatccagggcatcggctgaggggcgctccgcttttctgtaaacagggagtgcaatgaggccggtcaggttttccggaacgccgatatctatcaatacctgtttccattctttttgcgggtgcatttttatatagtctattcccagattatatccggtgattaatagttcgatttctcttcttttttcgttgatggcttctcgggagaaagcggtgacagtgaaatcaattcccaattcctgtgtgctgatcagagaccggtgacgggcattcattgcgatggatgcggcagggtcggggaggaaggatgcgtcaatctgatcgtattgcagcatttgcaggcgaagagggagctgggcgatttccggtttgttcacttctgcctgactgattcccgctttgttcagtagctgtccggttgcatactcgataatcgtattatgtgaaacagctatatttttttctttgagttcctgaagttggttgataccgctttctttggagactataaaacagaaataaccgtcatgtttcaaaatgattcctaagtcggtatggtggatagcctgtagagttactgcactgggatagtcggtgatcatgccatccattgatttgaactggaacgctgcgtcgcggtcataggcggaattgaaagaaaggatggttaaatccaatcccagcgaatcgtagattccttgtgctttagctatgtgaaaaggcagtccgtccagagtcgggagcattcccagtgtgagtggttgtaattctgttgaaggtataaagacgctttctcctttttttctttggcaagaataaaggaagaaaaggaggatacagaatatgagtgctgctctcttcatgccttagttgatgggtcagatataaataagggcaactcttttcacaaagaactgccctcgtatctaaaattacattgttataaattcattattcattaatggcagcgatacccggaagaacttttccttcgattgcttcgagcaatgcgccaccacctgtagaaacataagatacgccgctagccagaccgaacttgttgacacaagctacagagtcgccaccacccacaagtgagaatgcaccgttcttggttgcttcaacgatagcttcacctactgtacgtgaaccgtgagtgaagttttcaaattcgaatacacctgtaggaccgttccaaagaatagttttggattctttgattacgttagcgaagatttcttcagtcttaggaccgatgtcaagaccttcccatccgtcaggaatttcatcaacagcgcagaactgagtgttagcgtcgttagagaaagcgtcagcgatcttagcgtcaacagccagtacaaggtttacacccttttcttttgctttcttgatcagatccaaagccaggtcaagtttgtcgtcctcacagatagagataccgattttaccacccattgctttggtgaatgtataagtcataccacctgcgatgatcaggttgtctaccttattcaacaggttttcgatgatttcgattttagaagaaactttagaaccacccatgatagcagtgaacggacgttggatgtcgttcaatactttatcaacagcttttacttctttctccatcaggtaaccgaacatcttgttgtcagtgtcgaagtatttagcgatcagagctgtagaagcgtgtgcacggtgagctgtaccgaatgcgtcgtttacgtagcagtcagcgtaagaagccaatttcttggtgaattctttctggctttctttgacagccttctttgcagcagccttttcttcgtctgtggcatcttcagccaaacctcttggtttgccttcttcctcagcatagaagcgaaggttttcgagcaacagaacttctcccggttgcagagcagcagcttttacagcggcttcttcgcccatgcagtcgttagcaaactgaacttcaacgcccagcagttcagacagatgtttgatgatatgtttcaaagagaatttgtcggcaacgcctttcggacggcccaggtgagaaccgatgatgatgctaccgccgtcagccaaaatcttcttcaaagtaggaagagctgcacgcatacgagtgtcatctgtaatgttgaagttttcgtccaggggtacattgaagtccacgcgaacaaatgcctttttaccggcaaaattgaatttgtcaattgtctgcataatactctatttttatttaaaagtgtttttaatattctcttttttgatcgaccgcaaagttactatttatttcggttccttgctattaaatcgttatttattcttggcttttggtgcctcttttgtaactttataagtgttacagaaatatttgcacatcatttgcaaaccgcaggtgtcacatttcggcgtacgtgcctgacaaacataacgaccatgcagaataagccagtgatgggctatgggtattaatttttccggaatgttcttcaccagttctttctctacgctgaatggagtcgtacaactgtccggcaccagtccgatgcggtgactgacacggaaaacgtgggtatcaaccgccatcgctgctttgttgaaaacgacggactgaatcacattggcggtctttcttcctacaccgggaagtttgatcaggtcatccatgttgtcgggcactttgctgttgaagtcattaaccagcattttagccattcctaccagatgtttggctttgttattcggataagatacgctccggatgtattcgaaaataacttcaggcgtactggcagcaagagcttccggagtcgggaagtccttgtagagaggcggagtgatcatatttactcgtttatccgtacattgtgcagaaaggattacagcgatcagtaattcatacggattattgtaatgtaattctgtttcggctacaggaacatttgcctgaaaccatgcgattactttttcataacgttctttctttctcatcttaacttgtttttatggtagtgaggcgttacttttaatttgaaatagacagcggaaactactgtcaggcaggcaccgaaaagatatgctttgtcaaacgaacagatttcggctatatatcctccggtcagcataccgataccaattcctacatcccatgaggtcaggtaggtggaagtagctgttccccgttggttgttgggggcaaggtttacgaacagagtattgaatgccggaaacataattccgaatccgattcccatcagcagggcaattccgaaaaagagaatggtgcaggcagcatcattccattgaatcagatatacacaggatgcgagcaggaagaaacttattataaccagattgagtccggcggcaattacttgggttatctttccccggtccaccagctttcctgagaatatacgggaaatggccataccgatcgccataaaggtaaaaaagaaacctgtttgtgtatggattcctatttcgcgggcatacatggctacataattggtggtcattccgtaggggatggagagtagcaacaggctgagtcccgcaggcattccttttaataaaatgaaacggtcgagtgaaatcggttcacgctttaccggtggtttataaggtgtcttcaccaggcttgcggacaggaatcccagcatacaggaaccgagcgcatagcagaatattgtagcgaaagaaacccctccgtcatgtaaaaacagtccgaacatcggtccgatggacatggcgatattattggtcagtccataatagcccagcccttcacctctgcgggaagagggcataatgtcaatgactactgtatttccacctactgtgaccatgccgaaagagactccatgaataattcggaatataataaatagggtaagcgagccggcgataagatatcccgcaaacatcagcataaagatgaaataagcgaaaagataaagcggcttacgggcaaacgtatccagcagatagccggaaaacgggcggatgcagagtgcagctaccgtataacaggaaagcacgatgccgatagtggaatttcctgcctgaaagaactcggataaatagaacggcaaaacaggaatcagcaaccagaaaccgaagtagagcaggaagttggctgccaagatgaaacaataaccgggagtaatgagtctatcctttgccataataagtgaacgttcaatttgctgatcggaacggtgataagccatcccgtttcagtgtaatcggtatattgattaaatgccaatgtcccaattaccatcagatggttttattggcacattggcatactggtaaattctgtgctctatttaatatgctgcttcgaattcttttaagaagcgtgtatcattttcggagaacatacggaggtcttttacctgatatttcaggttcgtgatgcgttcgatacccattccgagagcataaccgctgtatactttgctgtcgatgccgtttgattcgagtacgttcgggtctaccataccgcaaccgaggatttccacccaaccggtatgcttgcagaacggacaacctttaccaccgcaaatgttacagctgatatccatttcagcacttggttctgtaaatgggaaataagacggacgcagacggattttggtgtctgtgccgaacatttctttggcgaagagcagcaatacctgtttcaagtcggtgaatgatacgtttttgtctacatacaacgcttctacctgatggaagaaacagtgtgcacggtagctgatagcttcgttacggtatacacgtcccggacagatgatgcggataggaggtttggaagtttccatcacacgggtctgtacagaagaagtatgagtacggagtactacatccggatgagcttcgatgaaaaatgtgtcctgcatatcgcgtgccggatgatcttcggcaaagttcagtgccgagaatacatgccagtcgtcttcgatttccggaccttcggcgatgctgaatcccagacgtgcgaagatatcgatgacttcgttctttacaattgtaatcggatgacgtgtaccgagttcaatcggataagccgagcgggtcaggtcaagaccgtcgcaactattatcctggctctcgaactgttccttcaacgcattgattttgtcctgcgctttagttttcagttcattcagtctcatgccgacttcttttttctgttcggcagctacgttacggaaatccgccatcaaatcgttaatggctcccttcttactcaggtatttgatgcggagagcttcgagttcttcggcattggaggcgtgcaaagcttccacctctttcagaagttgttcaatcttagctatcatatttttgatgtattgttattcagtttcttagtaaaaaccgtgcaaagatataattttatcacgaaccatcgaaataatttgtatctttgttgccgaatgtaccgaaaatcggggaacacttatgaaaaagattgttatttctcttctgctattgactttatcgtttcgcctgtcagctcagatcgactatctggagccggtgaagccttttactacctatacgggtgagttgggtgagtattatcgaaatgtcttttctttgcttaatacaggttttcaacagcgtccttacgcgcgttttgtagccattccttctttttcaccggaatatgcaatgtcggtagagaagaagaacggacgttgtctgttgattgcgaatactttgtcgcgtacctattggcaggcagagaaaggaacggtgaaagtggaaactaaatcagtggagatcagtcagtccttataccagtctttgggagctatcgcccgtctggtaaccagccagatacaggatttggacggttcgacagccggactggatggagttgtttattacttctcatcgacagatgcgaaaggaaaagagatgatgggacggaagtggtcacccatgaaaggtactttgatggagcggcttgtgttggtttgtcagtcgacttacatgttttctcagggagaaaatatttcggaacaagcattggcggaggaagcaaccgctttattgaaagagctggagcaccgtaccaaagaacagccggacgctcacaaaaagccgatgtatgtggggatttattctgttggtccgaagctcaaaacgcattcgggaaagcaaattgaagaattaccctgcttggctgatgtttgtgtacgggaatatgtagccagacaaatgatttatcctgtggaattgcttaaagacaatgtctcgggatatgctttgtgtgagtttactatagataaggagggagtgattcttcgtcctcatatattaaaatcgactcatccggagtttgcagaagaagctcttcgcattgtgaaggaaatgccaaattggacaccggcactggtgggaggcaaggcggttgaaagtgattataccctttatgtccctttccgtccccagttgtataaagaacagttgcagatacgtgaacgcgagttgtccaaaaaacattaacgcccggaacttttctctttttatattgtattatcattgtaaccaataaaaaaagagaagatatggatgatatgattaacagacacgattcgattgctgaggaaaatatcgaaccgaatggccgtccggctaagaatgagtttgaagaatggagcactgaagttaccgatcgtgcagataatgtattcaaaggtgatacgaaagacggtcccatcaaggatcgtgagaaacgaataaaagaaatggatgaagtgataaaaaaggaccttgaataaaggtccttttttattgtatatatgatatcttttttaacacgatctcgtgcttatcgttgtaggccatgagaaacttttcagtaactttgtagcccaaaaatatagatagtatgataaaggtattattgcttgatgtagatggaactttgttgagttttgaaactcataaggtgtcgcaatcctctatagatgctcttaaaaaagtacatgatagtggaattaagattgtgattgctaccggtagagcggcaagtgatcttcatgagattgatgctgtgccgtatgatggagttattgcacttaatggagcagagtgtgtattgcgtgacggaagtgtgataagaaaagtagcaatacctgcacaggattttagaaaatcaatggagcttgcacgggaatttgattttgcagtcgctctcgaattaaatgaaggtgtatttgtcaatcgccttaccccgactgtcgaacagattgccggaattgttgagcatccggttccgccggttgtcgacatcgaagagatgtttgaaagaaaagaatgctgtcaactttgtttttattttgatgaggaaacagaacaaaaagtaatgccgcttctgcctggtctttccgcaacacgctggcatcctttatttgctgatgttaatgttgcagggacaagtaaggcaaccggtctctcgttatttgccgattactacagggttaaagtttctgaaataatggcgtgcggtgatggcggtaatgatatccccatgctgaaggctgccggaataggagtggcgatgggaaatgcgtccgaaaaagttcagtcagttgccgactttgtcactgatacggtggacaataatggactttacaaggctttgaaacatttcggggtaatataaatgtcttaatgaagcttggctacaaagccaatcacaggtttaaaataaaaaaaagagtaacttatcataagttactcttttcattttgtggagcgtatcggactcgaaccgatcacctcgacactgccagtgtcgcgctctagccagatgagctaacgccccatttttatgccactgatataacgtttgtcaacgttttgcttttgttggcgcaaatataatggaatattctgaaataattgctatgtttgcggaaaataatttattgaaaggacagatgatatgctgatttataatacaacttttcaggtggacgatgctgttcacgataattttttgatttggataaaggaaaactatatacctgaagtacagaaacacgggacgttgaaagcaccgcgtatctgtcggatactgagtcatcgggacgacggaagttcttattctttgcaatgggaagtagagagtagtggattgctgcatcgctggcacatggaacagggagtgcggctgaatgacgaacttacgaaaatattcaaggataaagtagtcggttttccgacattgatggagatagtagagtgattcaaccggtaaaagaaaagattattttgggtatagaccccggtacgaccatcatgggatatggagtcttgcgcgtgaaagggactaagcctgagatgatcgcgatgggaattatcgatttacgtaaatttgccaatcattatctgaagctgcggcatattcacgaacgggtattaagtatcatcgaaagctatctgcctgacgaactggctatcgaagctccttttttcggcaagaacgtacagtccatgttgaagttgggacgtgctcagggagtggcgatggcagtggcattgagccgtgatattccgatcacagaatatgctcctttgaagatcaagatggctataaccggaaacggacaggcatcaaaggaacaagtagcggatatgctgcagcgtatgctgcattttcccaaagaagagatgcctacctttatggatgcgacggacggtttggcggcagcctattgtcattttctgcaaatgggacgtccggcaatggaaaaaggatatagcagttggaaagattttattgcgaaaaatcccgataaagtaaaataaacccgcaatgaaagaggctgggagtgagaaaagtaataaacaagtaagtgcgaaggtagtgtgagtaccgcaggggaggtttagtatgaaaatgggaaccaattatttagcgatattaggggtgactacggtgacgacagtaatgagttgtactactgcgaaaaaggaatatatgtcttatgaattatatccggtccgtacaggaagtctgattgaaatggagtatacaccggaggcaacgaagtttactctttggtcgcctacggcagatgaagtacgtctgatgctttatgaggcaggcgagggcggacatgcctatgaaacggtaaagatgcagtcgggggaagaaggaacctggacagctgtggtaagtaaggaccttattggcaagttctatactttcaatgtgaagatcgatgacaagtggcagggagatactcccggaataaacgcccgtgctgtcggagtaaacgggaagcgggccgccattatcgactggcaatccaccaatccggacggttgggagagtgacacccgacctcctttgaagtctcccgccgatatgattatttatgagatgcaccaccgtgacttttcggtcgattctacttcaggagtgaagaataaaggaaaatatctggcactgaccgaacatggaacgatgaactccgacaagttactgacaggtatcgaccatctgatcgaactgggcgtgacacacgtgcatctgcttccttcttttgattacgcttcggtagatgaaaccagactgaatgaaaattcgtacaactggggatatgatccgcaaaactataatgtacccgatggttcctatgccactgatccctatcagcccgccactcgtgtgaaagaattcaagcagatggtacaggcactgcacaaagctggtatccgtgtgataatggatgtggtgtacaatcatacattcaataccgatgagagtaacttcgagcgcaccgttcccggttatttctatcgccagaaagaagataaaaccttggcaaatggctcaggctgtggtaacgagactgccagcgaacgccttatgatgcgtaagtttatggtagaatccgtcctttattggataaaagaatatcatgttgacggcttccggttcgacttgatgggaattcatgacatagaaacgatgaacgagatacggaaggctgtgaatgcggtcgatcctaccatttgcatttacggagaggggtgggctgccgaggcgcctcagtatccggctgactccttggcaatgaagggaaatatagcacagatacccggagttgctgtcttttctgacgagctgcgtgacgggctttgcggacctgtaggtgataagcgcaaaggagcttttcttgccggaattccgggaggggagatgagcataaagttcggtatagcaggcgctatcgagcatccgcaagtacagtgcgattcggttaattatactcaaaagccgtgggcgaaacagcctgtgcaaatgatcagttatgtttcctgtcacgacgggctgtgtttggtagaccgactgaaggcaagcatgccggacatcactcccgaacaacttatacgtctcgataaactggcacagactgtggtctttacttcacaaggtattccgtttatttacgccggagaagaaatcatgcgtgataagcaaggcgtggacaatagttataagagcccggatgcagtgaatgccatcgactggcggcgcaaaaccaccaacggagatgtcttcatgtattataaacgattgatcgatctgcgtaaatctcatccggccttccgcatgggagatgcaggacaggttcgaaaacatctggaatttcttcctgtggaaggaagcaacctgattgctttccgtctgaaagaccatgcaaatggagatcattgggaagatatcatcgtcgcatttaattctcgtcctactcctgccaggcttactattccggttggtaaatatacagtggtatgtaaagacggagtgatagatgtacgtggattaggcatacaaaacggaccggaagttattattcccggtcagtcagctttgattttatataagtaaattcagtcttttgataatcgaacagaatagaagaatatgattcagaatacattcaacatggcggggggcatggcacgcaacccgcttgtgcgtttagctgcacccatcacggcaacgatttcagccggagaacacattgcaattgtagggcccaacgggggaggaaaaagtctttttgtcgatacgctgatcggtaaatacccattgcgtgaagggacgctgcaatatgacttttctccttctgccacccagaccgtctatgataatgtgaagtatatcgctttccgtgacacttatggggctgcagatgctaattattactatcagcaacgctggaacgcccacgatcaggacgaagcgcccgatgttcgtgaaatgctgggagaaattaaggatgaacaactgaaacaagaactatttgaactttttcgcatagaaccgatgctcgataagaaaataattcttctctccagcggagaactgcgtaagttccagctggccaaaactctgttgacagctccccgcgtattgattatggataatccgtttatcgggctggatgcacctacccgcgagttgttgttctctttactcgatcgcttgacaaagatgtcgtccgtacagattattctggtattgtcaatgctggatgatattccttcatttattacccacgtaattcctgtggataaaatgacggtgtactccaaaatggaacgtgaggcctatctggaagcttttcgttctagggatgtagctgtttcttttgatgagttacagcaacgtatcgttgatttgccctatggtggcaataattacgattctgatgaagtggtcaaattgaataaagtcagcatccggtatgatgaccgcactattctgaaagagctcgactggacggtgcgacgtggtgagaaatgggcattgagcggtgaaaacggagccggaaaatctactttgttaagccttgtctgcgcggataatccacaatcatatgcttgtgacatcagccttttcgggcggaagcggggtacaggggagagtatttgggaaattaaaaagcatattggctatgtaagtccggagatgcatcgtgcttatctcaaaaatctgccggctattgaaatcgtggccagtgggcttcatgacagcatcgggctgtacaaacgtccccagccggaacaaatggccatctgcgaatggtggatggatatatttggtattgcggaattgaaagacaaaccttttttgcaactttccagtggagaacaacggctggcattgctggcacgtgcttttgtgaaggacccggagctgctgattctggatgaaccgcttcatggtctggatacttacaaccgtcgtcgggtaaagaagattattgaagctttctgccatcgcaaagacaagacgatgattatggtgactcactacgaatcagagttgccgggcactattacagaccgtattttcctgaagagaaaccgatgaaatggactgttgtctgaaaaataatgtttggctctgccattctgaatataatgaaggatgacagagcaatttaaaaaagatttttttaattaattggatgggtgaaccaaaagcaggacccttttcctggttctgattccacaccgattttccctcccagttgcgtgacgatactttggcagatagacagtccgagtcccgtaccgggaataaaactgttgagctttacaaatcgggtgaagatagcttcctgtttttccggctctatccccattcccgtgtcctgaacggagaatttcacttcgtttccgtctatttggtagtcgatggtgatatttccttcggaagtgaattttaatgcgttagtcacaaagttcagtaatacctgataaagtctgttcttgtcactggtgaacgtcagttcgggtaaattatctttcaggcggagttctacttgcggactagttttcatttgtatagcctgaaacagatcgttacaaagctgtttcgcattcaccctttcaggaataatgtcgaaagtttccgcttcgattttcgataagtcgaggatatcggaaataagctgaagcaacaacttgttattatcttctatgatcgtgatatactgatgcttttcttcctgatcctccgcctcttccagcatacttgagaaaccgacgatcgcattgagcggagtacgtatctcgtgactcatgttggcaaggaaggcagattttaaacgatccgcttcttcggctttctctttggctttgataagcatttgctcggtttcttttagctgggtaatatcaaagttgatacacagcatttcgatgacattatcctgcggtcggtagttgcggaccaacacattcacccgtgtccacgtataacttccgtcggctctgcggatacgtacatccctgcataatttcgtactttcgcctttgaccactttcgccagaaagtcgagcataacagcccggtcctccggatgaaagtgagaatggataccgataatttccggtaggggcgtgccttcctcttctcctacatttttataccagctgcttaaggcataaccattgcggcttaacgcatcaaaatgagcgtatccaaccttggcataatctcctaccagttcaaagaaatttttaaattcctgaattttgttgtaggcgatggtgttttccgtcttatctacgtttatcaacagataattgataggctgccggtcatgatcatagagtgttgttattcttgttgtcagattaatgaaaccggatgttttttccgattcataatatcctttgatttttgaaaaatcatattggaaggtgaattcaacctcttcattatctctgatctttagctttatttcttcgggtagtgccggattctcaaagatattgataccaataactttttctttatgggtgatatggaacatttccagttcctttttattcaagtcaagcagataaccgtctttattatacagttcaatgccgacgggaaggtttttatagatattgtgcaggatacgttcactgttttgcagtgcctgataggcggaagccatgtggggaccatcttgagtttctgctattccgtatattttggtgtttccttcctcatcagtttcctgaaagcatattttactgcgaatccatacttccccgtggggagtatggagcaggtacacctcctcaatgctctgttgcaatttatcgaaagagtagctggtagtatggtgctgatcctcccttagaatacgtttattgaaatcttcaaaactgatcactccgtcttcgtctatcccgagtaatcgggagataaactcggaacataaataactttctgtttttaagtccgcttcccaccatcccatattcgctttattcagcagtttttgcaggaatgtgtattctttctgtttgcttgtttccaatgtctgacttgttttaactggcggttgaatattcatttagtccgtaaaaataatcatttttattgaattcttttcaataaaccatcacttttaggtattgatacctgctgattctttcgtgaactttgtagagtaacaaaatgttgtatatataaaaagatgaaaggagatcattaagaatgaaaaagatagtattacttcgtcatggagaaagtgcttggaacaaagaaaaccgtttcacaggttggacggatgtagacctgacggaaaagggagttgccgaagcggaaaaggcgggcgttacgttgagggaatatggcttcaacttcgataaagcctatacttcttatctgaagagggcagtcaaaaccttgaactgcgtgcttgataaaatgaatctggactggattcctgtcgagaagagctggcgtctgaatgagaagcattatggcgacctgcaaggactcaataaggcggaaactgctgagaaatacggagaaaagcaagtgctgatatggcgccgcagttatgatattgctcccaatccgctttccgaaagcgatttgagaaatccgcgtttcgatttccgctatcacgaagtacccgatgcggagctgccgcgtaccgaatcattaaaagataccatcgaccgtattatgccgtactgggagtcggatatatttccggctttaagagatgcgcataccttgctggttgtcgcgcacggcaatagtttgcgaggtatcatcaagcatttgaaacatatttctgatgaagatatcatcaaactgaatcttcctactgccgttccttatgtattcgagttcgacgagaacctgaatgttgccaacgattacttcctgggcaatccggaagaaattcgtaagctgatggaagcggtagccaatcaggggaagaaaaaatagcaggcttcatcgcctgtatataaattgttatacattaaaaaaataaagttatgagtaaagtagttgatttattaggagataagaccagttattatctggaccatacctgtaagaccattgataagtcgttgatttatataccctcaccggataccattgataaagtctggattgattcggaccgaaacataaaagtattgaatagcctgcaaacccttttagggcatggacgcttggcaaatacgggttatgtgtccattcttcctgtcgatcaggatattgagcatacagccggcgcatcctttgcaccgaatcccatttatttcgatccggagaatattgtgaaactggctatcgaaggaggctgtaatgcagtagcttccacattcggtattctaggatcagtcgcacgtaaatatgcgcacaaaatacctttcgtggtaaagttgaatcacaatgagctgctgacttatccgaatacatacgatcaggtattgttcggcacggtgaaagaagcttggaatatgggagctgtagcagtaggagcaactatttatttcggttcggaacagagtcgccgccagttagtagagattgccgaggctttcgaatatgctcacgagcttggtatggctaccattctgtggtgttatttgcgtaatagcgatttcaagaagggagctatcgattatcatgctgctgccgaccttaccggacaggctgaccgtttgggagttaccatcaaagcggacattgtgaagcagaaacttcctaccaataatggtggtttcaaagcgattggtttcggaaagacagatgaacgcatgtacacggaactcacatcggaacacccgattgatctctgtcgttatcaggtggcaaatggttatatggggcgtgtcggattgatcaattccggtggagaatctcatggggcttccgatttgcgtgatgcggtcattacggcagttgtcaataagcgtgccggtggtatgggattgatcagcggacgtaaagccttccagaagccgatgaataagggtgtcgaattattaaacgctattcaggatgtctacctcgatccggcaataaccattgcctgatctaggaaagatgagaaataattcttatctttgactaccagatagttaaccattaaaaaatagaattatgaagttttttattgacacagccaatttggagcagattcaggaggcgtatgacctcggagtacttgacggagtgactaccaatccttcgctgatggcgaaagaaggcattaaaggtacggagaatcagcgtgaacattacattaaaatatgtaaaattgtcaatgctgatgtaagtgcggaagtaatagcaacggattatgaagggatgatccgcgaaggggaagagcttgccgcactcaatccgcacattgttgtcaaggtgccttgtattgctgatggtatcaaagctatcaagtactttacagaaaaaggaatccggaccaattgtacattggtattttccgtcgggcaggcattgctggctgcaaaggccggagcgacttacgtttcgccttttgtcggacgcctggatgatatttgcgaagacggggtagggcttgtcggtgatattgtacgtatgtatcgcacctatgattacaagactcaggtattggcggcttctatccgcaatacgaagcacatcatcgagtgtgtggagatgggagcagatgtggctacctgtccgttgagtgctatcaaagggttgttgaatcatccgctgactgattcgggattgaagaaatttttggaagattataaaaaggtgaatggataattgggtttgagaaactaagttttcttcaaagttatattgatagaggcttctgacataaatatatgttagaagccttttttagttattttaataatgtcaaacaacataaaactaagacttctcgtttattcatcttaatttgtatcgtgtaatctaactagtgatgtaaataatgaataaaaatggatttagtcgatgtgccgatatctatatcggccgtttgcgagaggagggccgctattctacagcgcacgtctatcagaacgcccttctttcttttagcaagttttgtggtgtccatagtgtgtctttccgtcaagtcacccgtgagcgtcttcgccgttacgaacagcacctttacgaatgtggtctgaagcccaatacgatttccacgtatatgcgtatgcttcggagtatctataatcggggtgtggaagccggcagtgctccttatgtccaccgcctgtttcatgaggtctatacgggggtggacgtgcgtcagaaaagggcgcttcccgtcgtcgctcttcgcaggcttctttatgaagatccccagtctgaccgtctccgccgtacccaggctatcgccgctctgatgttccagttctgcgggatgtctttcgccgatctgagccatttggagaaatccgctcttgatagcaacgtgctgcgctacaatcgtgtcaagacgaagactcccatgagcgttgaggttctggacagcgcacaggagatgctcgaccaactccggaaccggcagtctccccgtcccggctgtcccgactaccttttcggcattcttcacggtgataagaagaggaaggatgagagagcctaccgtgaataccagtccgctctccgaagattcaactactgtctgaagtctctggcaaagcggctgcgtctcaacttccccgtcacttcctacacgcttcgtcattcgtgggctactactgccaagtaccgtggtgtccctatcgagatgatcagcgagtcgcttggtcataagtccatcaagactacgcagatttatctgaaaggctttgaactgaaagagcgtacggaggtgaaccggatgaatttgtcttacgttaagaggtgcggttctggcctgtatgtgtgatttagaatcctgatatacag

SEQ ID NO: 4748 - DNA, 18687 bp, Unknown
  gut microbiota DNA sequence
ttcggcaatcctgagtggaaagattataccctgtctttcaaggcacgtgccccgaaagacgccgaacaggtacagatatgggcaggcttccgtacacataaccgctttgaccgttatgtgataggtatcaaaggcgggttgcaagacgatctctacctgatgcgtaccggatatatgggtacagacgaattcatgggagtccgtccgctgggctttcaccccgtgccgggagagtggtacaaagtgaaagtggaagtatgcggtaaccgtatccaggtttttgtaaacgacgaaaagcttcctcatattgatttggaagataaaaacagcaatctggctcccaccggtgaagtagcactgggaggcggatggatagatacggaatttgatgacctcactgtcaccccattggcagaagacgctctcaaagatgtcaaggttcaggagtatcgtatggcactcaccacacaggaaaaggaaaagatacgccgcgaagagcgggcgcaatatacctccgtcaaactggataaactgactgccgaccgaaccgaactatcgctggacggaaactggctgttcatgcccgactaccaactgaacgataagacgaaggctatctccatgcagactaacgacaacgactggcatataatgcctgttcccgctttctggaaccctatccgtatctggctgcatggagaaaccatgccatcgcccaccggtccccaacataaaggggtatcggacacctactaccaacaagaaaccgaccgatgcgagaactatacgttcaactaccggaaaaccggtgctgcctggtatcgccaatggctggaactgcccgccgacgtgaagggaaaacagctgactctttcattcgacgccgtatccaaaatggcggaagtatatattaatggtgaatcggcaggttccaacatcggtatgttcggtgatttccaagtagacgccacccgattcctgcgtccgggacgcaacctgatcgcagtaaaagtgacacgtgacatcaacggaaaagccgcacaaaccagtgacgccatggaaaactactattcgtcagtacgcaaggaagtggaggataaccagaacgaccagcaggccaacaaagccgtattgacagacatccctcatggattctatggtgataaccctgccggtatatggcagcccgtaaaactcattgtcagcaacccgctgaaagtagaagatatctttatcaaaccggctctggacggtgcatcaatagatgtcaccatcaaaaatcatgcgcccaaaaagaaaaacttcgatatccgtatagatattatagacaaacaaacgggggaaacgttgtacggtgcacctgtacgtagcaaactctcattagcgacaagcgcacaagaaacatttacctgtgatatcaaagggctgaaacccaaactttgggaacctgccactcctaatctttatgattttcgcgtgagcctgacggaaggaaaaaacaaagtgacggactgcatcaccgtaacttcgggattccgcacgtttgaaagcaaagatggattcctttatctgaacggccgcaaatattggctgcgtggaggtaaccatattcctttcgctctctgtcccaatgattcgctccttgcagacaagttcatgaaattgatgaaagaaggtaatgtacagtctacccgaacacataccaccccctggaacgaactttgggtgtcggcagcagaccgcaacggtatcgctatcagctttgagggtacttggtcgtggctcatgatacactccaccccgataccggacaaaggtgtgctggatctttggagcagtgaatggctgcgtgtgatgaaaaagtacagaaatcatccttccgtattcttctggactgtgaacaatgaaatgaaattctacgatctggatgccgacacggaacgtgccaagcaaaaattccgcatcgtatccgatgtagtgaaagatatgagaaagactgacccgacacgtcctgtatgtttcgactccaactatcttcacaacaaagccagcaaacgctttggtgatgactttctgaaaacagttgatgacggagatattgatgacaaccatgcctactataattggtatgactattcggtattccgcttcttcaacggagaattccagaaacaattcaagagtcccggacgtccgttgatcagccaggaaatgagtacaggttatccgaatgctgaaaccggtcatccgacccgctcttatcagctgatccatcagaatccctattcattaattggatatgaagcatatgactggggagatcccgccagtttccttaatacacaatcgttcatcacgggagagttggccgaaaccctccgtcgcaccaacgaacaggcttcgggcatcatgcactttgcctatatgacttggttccgccaatgctatgatcaccagaatatacaaccgtatcccacttactacgctatgcaacgtgctatgcagcccgtacttgtcagtgcggaactgtggggacgcaatctttatgcaggtgagaagttacatacacgtatctatgtagtaaatgataatgaagaaggacgtgacttaaagcctacgtcactggcatggagcattgtagacgaaaccaataaggtactggcttccggcacggaacaatttccggcagtggaatattatggtcgtaaatacatcgaaccgaacatccatatgccttccaatttaccggcagacaaggttaatgtaaaactgaaactcactctcaccgaaagcggagtcactttatcccagaatgaatacggattattagtggcacgcaaggaatggaatatcggtcaagtaactgccagcaagaagattcttttactggataaagatcatatgaaagttacccttgacttcctggacatcgcctgccagacagtaccgtctatcaaggaactactgaatgccaagcaaaaagctaatctctgcattatatcgggcttgaaagaatgtaccgatgaagaagcaagattactgcgtgaatatcagtcaaaaggcggtcggattctcttcctgaacagcaaagaggcagcacaaaaagtctatcccgaatatatcaccggatggattattcccactgagggagacatcgtggtgatggaacggaatgatgcccctgtattcgatggaatcggtgcactggaattacgctatttcaataacaacaagcgtgaaattccactagcttgcaccgctacattgaaagctatccgccacgagaatgtgaagaaactcgccgcccaaatgaagatccatgcttatatcgacggtggtaagccggaggaacgtatcgcacgtatcgaatctatgcgcggactgacactgctacagatagccgacaataaaggaaagtctctcgtttcaactctatgtacagaaaaggcaaccactgatccgatagcaggtaaactgctggtaaacatggtgaatgaattattgaaataggtatgtaattaatatcattgagtggagtttttccattcttcctgcccgtcttcccattagaggagacgggcagttttgtttttgattataatcgaagtaattagcaaagatgttcttacaattgcaatccctgagttaattcacaaaagataagaaataataaaaacttcccaattcagtagaattcttagtgtcttcattgagaactgactaaaaagtcggtagtatccacattctcctccttcgggaaggaggagtggtcgaagaccgaggtggtaggtaaaatgatgtgtattcctaattttattgtaaatgaaataggagtgcattcacctaccacctccccctacgggtactcctccttcccgaagagagttaagatactaccgacttttagtcacctccattgtagatactaccgctttttcagtcaacctcaatgaagatagtttcgacttttaatcaaaccaaagaacaagccttatccaaactattcacatctttattctattgaacatagattcaaaccaaaaggcaactgattcattgcgaatcaattgccttttggtttcagtcgttaatagttgtctctggacagactacattacctccttatacacttagttttctctttataaagaagatacgtttttaataatatacgttttacccttcacagtagcaaaagagatttgatcatcagcaaatacctttacctttgctccggaaactttcagctcctttgcattcggatatttaatcacacattccgcaccggaattagaaagaatctctacagctgttatcttcccgtcagtccatgccgcgtctacttcaaagtttcctctcgctttcattcctttgaatgaaccatctttccatgcatcgggcaaagcgggaagcaattcgatatatccaccctgactttgcatcagcatttctgcgataccagccgtacaaccaaagtttccatcaatctggaaaggcggatgcgcatcaaacaaattagtatatacaccgcctacatggcttccgggaacagtcagtttcatggcacttctcaacagtttatgagaacgattgccgtcatgcagacgtgcccaaaagttcagtttccatgctttgctccacccggttccttcgtcgccgcgtgtattcagtgtcactttcatggcatctgcatatttatcgtcctgttcgcttcttccgattacaatctgcgaacccggatgcaaccaaaaaagatgattcgtatgccggtgcccaccatctccggtaacatccttcgtcacttcatctttccattccataaactgcccacccaaaccgattttcggtccggagagtttgctcatagctgttgctatctctacgatttcagggtctttgtcccttcccagttctttgctggctttgatcatcatgtcgaacatttcacaaatcatagcctgcgaagttgaacagcccagtgagaactcgccatgttcgggagagtgagacgggtttgctaccagtgtaccgtcgcgttcgtctgtccaaagattgtctacccaaaaaagagcagcatcgagcattgtatcataatactttttcaagaagtctttatcaaggttgaactgataatactcccaaatatcctgacacatccatattgcccctgccggaaaatgatgaggcgtgcttttcttggctggtgccgtattgccccagatattattctcatgatgcgtcacccagccgcgaacattgccaccatcgggtttgcaataatattgttgcgctgtatactttccacgaggcaccagacttctgacatactctaccataggcagatgacacggactcagattggtagactgtgtcggccaataattcatctgtatattgatattcgtatggtaatcggcattccacggattggaaagtctttcaccccatactccttgcaagttggcgggcaaagaaccttctcgtgaagaagatatcaaaagataacggccgaactggaaatacagcatttcaagatactggttttcctgttccgagttggtattctcgtccatacctttcagcaaactgtccgtaggagcaacgggtgcctccggcaagttaccgagattcagtcgcattctgtcgtataacgaatgatagtctttctggtgggtagccaacagagccgtgtacttcttatcagctactttatgcagcgtagcctgcactttttccaacggatcttcttgagagaaataattgtaggagtcgtccatgcactgtacatagtttgtggcggcagacatcagaacgattatttcatcggcatcctctactttcagcttcgttccgtccactaccgaaatctttcctcctttattcttcacgaccagttgctgcgcatatttcagtccattcttccaggcatcccctactcgcttgtctccgctgaccggagtcggatatcccgtcatggtaatagtatgactgtctgccgtaatggttttatcggtatgcagcgattcaagagaaatgatgcgtgaaagttttcccttcttcgaatctgaggtgagacgcatcaccattacattatccggataactcataaagtattcgcgcttaaaggtgattccattctccttatacatcaccgtatgaatcgcattatctatatcaagcgtacgggtatagtcggaataaggcagttcggtagaggcatctatcgagagttccgccaattgcggtttctgtttgttatcgattaattctgtgatttcgagtttgaagaaggtgtacttgtccgccttcaaaggaaaagacagggtcttattgcgactcccctttccgtccttatcatccccccaaaaagtgccggactgctgatccagcaagtcgtatgattttccgtctgtcgaaccgtagagtttccatgatttcggatctctgcccggcatatcattggccgaggtcagactataggaaacagccttgggagcatgggtatatgcccacttgataacgcatggcaggcttcccgcaccaaagaaccgatcgttatcggcaaaccatttgctggtagtgctctgatcgaaaaggctgcctatcgactgactttgattctttgtattgtcataattggtctgcactgcttcttttatcaagacgggaatgggaggattgacagtttctacaatgatattgctcaatgtctggaaagaaccgaaatgctcctttgttcctgccagattatcaatcagattccgcaattctgtgccgtcaccgtctccatcgtagttatgggtaatcagctttccattttcatctatatatgcagaacggtttgccgtaaagtcgttcatcttctgttgcaacatcacccgcgccttgtggagataatccttgttcacttccggagttctcagatgtcctccattgtaagacggatcttcaccggggcctcccgaccacaaagtatgttcgtttgtctggatgacatctacgtagacgtcaccaaaaatcatggctcccatataaccattaccgatgggcagggcttcactttcccagtttttggcaggcttattataagttgccttcaaggtcggctgataaggctgttcggagcaagccgtcatcgtagttcctgccacaaagctaagtagaaataatacatctgcaaaacgcaaatacttgtttctcataatactaaattttaagaagtaatgccttaagattgccccatactgtgtcatgcttgtgccaccctattggcacaactgtgccaaaggcttggcataacagtgccagtgcggtggcacaactgtgccaatagggtggcacagactgtgcaatcagaaggcattacctcagtgaatataatcttaatcttctttccggttcaaatttaaataaagtctataaatcaatgactgtttgcagacgaatatctttggaagaagcgccaaccattatgtcaaatgcccctttgggtaccacaaactgtcctttttctacatcccaatagcgaagttgctctttgctcaacttaatctctacccgacggctttctcccgatttcaaaggaacacgacggaatcctttcaattctttcaaaggaacaattcctccggtctccggtatccgcacataaacctgagcaacctcatcgccatttctcttaccggtattttttaagaggaaagaaacggtgacttcaccagcaccgtcctttacttgcagatcactgtatttaaaagaagagtaactcagtccgtagccgaacggataaaggacatctcctttgaaatatttataagtacgccctttggttatatcataatcatcaaacggaggcagttcatccaaagacttgtagtaggtgagcggcagacgtccggcaggattataatcaccgaacaatacctcggcaacagcggttcctccctgttcacccggataccaggcattcacaatggcaggaacatgctcgtccatccagttaacagccaatgaactgcctgctaccagaacaacaattatgttgggattcactttatagatttcctgcagaaactccctctgatctgccggaagctgaatatcataccggtcctgtccttcacgctctatcgatttattgatacccatcacagcaactaccgtttcacattcgcgaaccgccttcccggcttctccgtacaaatcgagacgagttgccttgcctatctgcggaactttccattgcaactttgcaatggcataatcccggttatcataatattccgctttcaactggtattcttttcccgcttcgagataaatggaagcggaatccgtagatacggcatgtgcctgccacgcatcaatcagcatctgattatcaatgctcaggcggcaaccgtcatcggatgtaaagctgaaagtatagcgaccggaaacggtcggtttcaactttcccgtccaacggacagacaacggagatttgggcaggaacggatcgggagcctgattggcaggttcaaagttgatccaactctctttacgcactctcggggtgccttcgaggcgggtattgtcaaaatactcagcttgcagtccttccgggaagttctctccctgaataagttccagcccatcggcagccgatttccagggagcatagacgactttcacccgatcgcccaccctgtttctgataccttgtagtatggaaactggttctactaccggagcgccgctgtaatcgccaaactcacatttgccggcattgatgccgactactgcgatcgatttcagtttgtcagcattcagcggaagcctgtttttctgattcttcagtaaaacgatacattggcgggcagcgtccagagctatctgctgatgttctttcgaaccgatcactgacggagagattttagtatacggatttcgttccccgctatcaaaaagtcccagtttcatgcgggccgtcagcacatgataggcggcggagtcaatatcggcatccgataccatatattgtttgtaagcattcaataaagggccgtcatatacatcatcaccgcattcaaggtcgagtcccgccttgatagataaagtggcagccgcctccttcgtctttacatatttatgggcattgaccagcaaggcaggtccgccacaatcggaaacgacatatccctgaaatccccagtcctgacgcaacaccttttgcagcagccacggattcagcgtgcagggcacatcattcagcgcattataggcggacatgatggaagcggcttttccttccttcacacacatttcgaaagcaggaaagtaatattcacgcaattgtttctccgatatctgtggattgcagacaaagcgattatgctcttcgttgttggcggcaaaatgcttgggagtagaaacgattttcaggtaatgcgggtcatctccttgtagtccgttcacaaaggctgttcccattattccactcaggaaagggtcttctccatacgtttccggtgtccgtccccaacgcgggtcacgtgccatgttcacagtaggcgaccagaaagtcagcacatcgctgaattgttctttctgttctcttccctgatccagctcgttccaacgggcacgtgcctcatccgagattactgtagcgacccttttctgcaactccggattccaggtagctgccagtccgatggcttgtggaaatacggtgaaacgtccgggacgtactactccatgcaatgcttcattgccatgatagtacttatcgatacccaaacggggaataccgggagaagtggcacgaagcaaactgatcttctcttccaccgtcaaacgggaaatcaaatccattacccgttcatgtacaggcgcattttcattcttgtatagctcctgtgcgtgaacgaacgaacaagacaaggctgacaacacacctgtcaacaaaatctttttataccttttcatcatgatcatttttctatcctattatctgtttttattaatctaccggaccatccatcaacaagtcatgtttcttctcctttaccccgtgagacttgaaaccgcctccgtctgtcgcaatgcccattacatggaacatcgagttccagaaggcagttgtttctttcgtctgcaagcgataatctatgactgacagaaccaaatctgtcttatcctgcaacggatatgtgatcaaagctgctccttccggcttttgtaatgcttcatacaagacgacctgagcgcatttccagtgttcgggagaagtattaaataaattccagtccgtgcgggaagcttttaatatgacattgcctttttccaccaatgctcccgccagcccttgcttcaagatgtaacggtctccttccatttcaccgaaatatagatcgggaagttcaaaatagtttccccagtaagtacttctgttcatctccaaagcagtggctttacgtttcgtcagcctgacttcatcgggcaaccatcggcagaagtccgcactcaacttctctccgctgcccaatgccagcaacataccgcccttcttcctccattttttcaaagcggattgtaatccttgcaaatctgccgttgtcacttgttccgcatctactatccataggtttgcttttcccggattctctgttaatgaaataccggattcagtcaggaaacggattaaatccggattcgcctttccggctaaatatgcaacagcatagacaggggaaggtaattccggtttcacaggatgttttacttctttgaatgcagtccattcgccaccgttcaatgccgctttcagtgcattaaacatcggaagcggtttatataaaggaagcgaactgtccaatcccggattaaaagtggttacataaggagggatacgttcatattgatatcccggtttgccttcttcatacggtttgccggcaaagattccatccgacagattcggaaggcggctaaaatcatggtatcccagattcatgtgctccaagccgaaccaacatacttccgaaggagaataatacgccagataaggaatggccatctgtttcacattctgaaagacatcgattgccaatgcttcactgcgcccttcataagacaaataggctttctctccgacaaaaggatatagctgatgaggacgcccgtaataagttgccccggattcacctacgatcaaaggtttattcagtcctttgggtaaatcgtccagtttcagaccatgagaaaagtgtttgctccatacaggcagacgtccgtccatatcgcgatcaccgtccaacgtcagaaagtcacgggtcggatcaaactgacgggcacttcctgtcagttccaccagtttgtcatcccaaacggcggcgacctcctttgccggcttattcaataaagcgatagcaaacatttcattccccgcgctccatcctatgaccgagggatggttacggtcgcgcatgatcagacgttccaaatgcttatgtgaacgctgccatgttacgtcttcttcaagattcagacgaatggaactaccgaacaaagccgtttcatccagtaccatcaatcccatttcatctgccaattcatagtaaacacgcggccagggctgcgcgtgcgggcgaaccgcatttccaccaaagtccttgatcatctgataccacgcataagcaaagcgtcgcgaacagatataagcactaaatggatgctggatatctccgaaacactgtattttctttccgttcagctgaaattcatcgccgacaatcttaaactgtctccatccgaaacgggttgccttgcagtcatagacctgcttctttccgtttacggtcaacagcagagtatataagtccggagtatccggagtccagaatttcaatcgatgatccggatgttgagtaataacaactttcttcttctctcctttttgaagcgtaacagtagtaacaggcatggtaagcgccgtgctccccaacgtccattttatctccggagctgtcagaatatcctttcctgcctggttcacccattcccggacttcgccattcaatgtcaggctcgccttttccggtgaaagatttatcaattctacttctaccttcagctcattcttatctacccacggttgtacaaatacatccgtaatccgtatctcaggcacagcaaacatatatacatcctgccagatacccaataaataatcagtattggaaccggtaggataagtcgctcccattttctgatagacgggatgcgacttgtcgaataacttggtatctcttactccaaccaacagctcattctcaccttcacgattcacatacgctgtaatatccgcctcaaaaggaagatgagcatcaaagttccggcaaatctcttttccattcacctgtatcacacaatctcccgcaacagcttcgaaatgaagcagaatccgcttttgctcccaatccgcaggaatccggaagttacggcgcagccaccccatacgggtatgtacccaatgttcgggataacttggaaagtagactgatcccggcgcatacggacgttgtgttccttcaccgaccttactgcctcttccccagtcattcacattgattgcagaaggtattttgatctttactttctcccactggtccggtttgggggcagacagttccggagctattcccgaaccgcttttccatgaagaaaggactgcaacacattgtaaatcccaaaatccgttcaggcagacttcatcccgatacggcttttcctgtggaataaccaagccttccgccggagagaaatcacggtcgaacaccactgcccggttttgtgccgtcatcgtctcagaaagtaatccgccaacaatgaacaaaccacatctaaaactctgcaaaacgattctccgtatactgcttctatctttcttcatgctcaaccctcctttcaatcaatcaattaccattctcattaaatgcctttatagagaaataatattccgaatccctgttgaagtaacgggcctcatactgattatcgtataccgtcactgaatgcgttaacttgtctttctgcgttccccattgcaggatatatccggtagcccctgtctgagcatcccatgtaaaacggtaaattctccggtcactgtcatcccgtatcgcccgaaaaccggtcactgcggacggtgcagtcccttcccccttaccgaatatgcggaaaccggacaaagaaaaacatccttccagctctttcgaattactgattcgcagatatctgagttttgcaggcttatctaacgtgaaaagacgatgaggctcatctttcttattctctctttcatcaacgagattcatccactcctttccatctgccgaaccttctatcaagaactgataaacaacaggaggatgaggtgcaaatactttaaaatgatgatcggcaaagttcacgtgtatcgcattgaccgtcaccggagtttccatgtcaatctgaagccattctcccttctttccggtttgagcggcccaccaggtttcgatttgttcatcattggctttgtccggttcatagccgggaagagaggaggaatcggaaacaggtttccggaaagaaagcagattccatcccatactcagatcggtcttattgaagtccacctttttgtcgggtatatagaaaggataatccgaccaggctgtatgggcatacattccgttgcgggcagagattgctaccggaaaaagtcccagtctccgttcaaaagaatggcgaacggagattgtcatagatgctatatgccagtagttgccatacttatcctgaaaggtatggccatgccctgccccaccgataaatccgcccggcttaaaggagaatggattatcttccatatattcaaaaggtcccaacgggttatctcctacataaatcccgtcaccatagatgcgatactgagtacccggagctgcatactgcaaataataacgtccttcatatttcagcatacaaggtccttcattccatccctgacgcggctcttcattattctttccgggcacttcccatccatatttatctccgtggtgttcgatcaacgctctggcttctccaatggcacggaaaccgtctttcggatctacttccactcccatgataggatctttatccgagcatccccaatacatatacacttttccatcatcgtctctatagaaagccggatcatgaagccggtaagtcagcttcgtatctaccggttcccacgcatccttttcaggatgggcattcttgaatatctgagttttaccgctggaagcggtaaagtacagcgtatctccgacaggaagaatggtaggagcataatcctccagagtcggtatggtagtgcagggaatgtattcccaatccgctaaatcttcagaacgccagtaacctccggacttggaagcaaacagatagtaatatcctttaaagtattccaagaccggatcggcggcttcgcgacgcgattcgtctttcggctggaaacgatagttcaggttgatcggattcgttacaatccgatgccggggtattcgtttctctgatgagcaggaagcgatacatcctgccaatacgcttgccattaatagggaagtagctcttttcatggtgtttttctgtttattagttcgtcggttcgtgttatttatcccagctgtccgtacggaaaggagatgccggcaagcctttctcattatacaggttacaacgggggctattggaaaatccgtaacgtacggccacaggtacagccacttcactgctagacacaatcaccttatttccttcaatcaccgcatccgcccatacaaacttacggtccgctcccgcaatgccgaagcctgtcagcttcgtcggtttcggatgaggcggctttcctgccggaatgtacggagaagttcccatcaccagttttttaccctgattggtaaactccagaatgatcttatttcctttcacagacatctttttataaagaggtcccatgccgacaattttctctccgtacgccagtttccgggcagcaagagccagccggtgtccgacatcgtatttatctaccggatgcaaatcgaaaggatctcctacatcgattgtcacagccattgccgtgttgggcagattcaaggccttcagctgtccttcccgtacccagcgccagccgtttccttcgacagacggctcgggatctaccggttcgaaattgggaagctgcacatatacgaaaggaaaatcaccgattccccatttctctctccaatccgtaatcatccgggagaacaaggtagcatattcttttccagagccgccggagttaaattctccctgataccagatgactccctttatactcaaagggattaaaggagaaatcattgcgttaaacagattggacggaccgttatttcccccattcggtttacgcggattgggcggacggggaactctgggctgtggtttgggaggagccggctttcctgctgcttgtgctgcctgcacagctatcgcccattctttttgtgcctgattccattcttttcctaccgttttatcccattcccttaccgcttcatcaaattctttctgcttctgtggataagtggcgagtatttccggattatctttcacattcttctcatacgcagctacatagtgagccaaagccggttcttgtttcaatccggaaaggctggtccaggcttctgcacgcgtacctccccatgcggactggataactcccaacgggcgtccgtttgcagcacgcatatcacgtgcaaagtaataagctgttgccgaaaagccctgtccattgatcttagccaacatctccggtgtacaaagcacccatctggcagcccgttcggggttagatgttccctgaggaacttcaatatcggtcaatggctctaacgacgtattcttgggaacaaagaacaaacgcagcaaaggatcttccgaagcggctatatcgtcagcatattcttttcttaccttcatcccccattccatattcgattgtccggaagcaacccatacatcgcctaccaacacatccgagtagacaagtttgttcttaccggcaatcgtcagagtctgcccttctttctttgtttttatcggtttcaggttcactctccatgttccgtcagtgtcagcagtcgttttcactttctgtccggcaaagactacctctacggtttctccggcatcagcccatccaaagatggcaatctttgtgtcttgctgcaacaccatgtgatcaccgaagatcagcggcatccgtacatcggctttcatctttgtcagcccaaagcttacggacaacaagaatatccatgatatgaaaagaagtcgtttcattttatttataagtctatatctacattactatatttccatttcactgtgacccgtttggaatcgggagtacagtgaatcattatttgtttatcctgtatcgtgacaggaagggattcccttccttgtttcgccttcgcctcagttactttgttttccgttaagataacgagagtcagcggaatatcaaactgttctttatttaaattacaattcagaataaaagacactaaattagaatcgattttcacgtccttgatagtggtcgcatcacgctgtctgatgtatcggccgatagtaccgaaagtatcgatccaaagatctttttcatgcttcttcgcataagtcagatgagattcaaaaacatcagggcgaagcggatcaaatccgtctgtcaaaccgtgaatcatagctacgccccatttcctctggctaatcagtttatcaacccattgattgatattctctgccgtggtatctctggctccaatgccttgctgaaaagtacgggctacaacatgacgtttttctacgatcttttcgacttgctcattgaagctgttgtaagggtaacaaaaagaaacggggaaaatacccgtttcctttcggatcatatcggcactattttctatctcatgttcaagttcttccggttcttttacctgagtcaccagattcttatgactgtacccatgattaccgatttcaaaacctttagccgccaatgtacgtatctcctcccaggtaacacctccccatgcacccggcttcttggcctcagcttcctgcagcgtaaccgagacctgcccgggaatgacaaagaatgttcccggtatctgcaacttctccatgatgggagcagcaatcagatactgattgcgcaatccatcatcaaatgtatagcttacagcaccggccttggcatccttaaagtcagcgattcgtatcttgaccggtacgtcatgaaccggttcggttgcccttacgaagagactggaaacaatcagtaacagtccaaaacaggttataagcctctgatacatatcacttatccggtaaaagttatcattcatttactattaaaggaatcttataaagacaccatcttgtatttggtcgtaaacgctacaggctgcttattctcttttgccagcttgaacggaatcagtttttcttcgcctgctcccagttcataatgaatggcatctcccaccttcttaccatccacaaacatttccaccttaccgatatccatcaacgtacctgtatttttcacactcacccacactgtcttctgattcttgacaaggttctcttctaccttggacacggcaagatcgaaattggcaccaaactcatgtgtataattaagcattcccgtgacacctttcttgttatcactatagcctacactatgtttgatttcatttttagctacgtaatcgggactcattccgcctaccatgatcttaaactctcctttttccacgactctgtccatccggtcattgagcaatgaaatatcatatggagtcatttcaaacgaaacagtcttcgattctcccggctgcaaatgaatacgggcaaagtctttcaattccataacacgggttttcacactggcatacatatccgtcacatatagctgagcgacttcatcacccgcacggcttcctacgttcttcactgtagcctgaacttccacattgccattcgccttttcctgtatcttcagattagaatattcgaatgaagtgtagctaagtccgaatccgaaacggtaaagcggataatattccatatctacatattcgtaacggcgtcctgaagtcttgaagttataatacaaaggaagttgtcctacgtgacgcgggaatgtcatcggcaggcgaccggcaggattgtaatcaccaaacagtacatctgccatagccggaccaccttcttgtcccggcaaccagtttactaagatagccttgcacatttcggatgctttcagaatatcataaggacggcctgcctgaagaatcagtatcaccggctttcctgttgcacagactgcttccagcaattcctgctgtttgcccggaaggattaaagtcgcccagtcgttattttctccacatgtcttacggacatcattggtcgcttcactggtagagcagtcacccagtaccataatcacgacatctgattgggaagctgccttcacagctttcggaatattggtttcgtccggattggtaaagtcacatccctgttcataaagaactttggtctgct

SEQ ID NO: 4749 - DNA, 297 bp, Unknown
  gut microbiota DNA sequence
acccagtaccgcaatcgtacgcagtgtctttgacaaaggaagaagattctctttgttttccagcattacaattgattcacgtgccgcctgacgtgccatttccttatggctgtccgagttccatcccgggtatattttcttccagtccagtggtttgcaagggttcttttcaaaaagttcgttgcggaacatcgtacccagcatcgtacggcatacattgtccagatcttccatattgatacgaccgtcttttgccgcctgaatcacttctttattattgtaagtatcaccgcaatt

SEQ ID NO: 4750 - DNA, 1983 bp, Unknown
  gut microbiota DNA sequence
gtagtgcggattttgcagtcgattacctgtggcataagccggatggaacctatacggctgctccgtccacttcgcccgagcatggtcctatcgatcagggagctacttttgtgcatgccgtagtgcgtgaaattctgatggatgcgattgaagcaagcaaagtgttgggtgtagataagaaagaacgtaagcaatgggagcatgtgcttgccaatctcgttccttatcaaataggtcgttatggtcagttgatggaatggtcggtggatattgatgatccgaaagatgaacatcgtcatgtgaatcatttgttcggcctgcatccgggacatactgtttctccggtcactactcccgaactggcgaaagctgctaaagtggtattggtgcatcgtggtgatggtgctaccggttggagtatgggttggaagttgaatcagtgggcgcgtttgcaggatggtaatcatgcttatactttattcggcaatttattgaagaacggaaccatggataatttgtgggatacgcatccgcctttccaaattgatggaaattttggtgggacagcgggaatcaccgaaatgctgcttcaaagtcacatgggctttattcaattattaccggctttgccggatgcatggaaagacggttctatcagtggtatctgtgcaaaaggaaattttgaggtggatatgatctgggagaatcatcaattgaaagaggctgttgtacgctctaatgcaggaggcaactgtgtcataaagtatgcggatcagactatctcctttaaaacagtgaaaggacgcagttatcagattggatatgatgcagccaaagggctcattaaaaattaaacacaaaatatcggaaaattagaaagaaaggatggtactggagtatttaaaattattcgtgacatttgcgaagattgggatgtttactattggtggcggttatgccatgattccgttgattgaacgggagattgttaacaagcaatggatgaataaggaagaatttatggagatgtttgctttgacgcagtcgcttccgggtgtgtttgcggtgaatatttccattttcgtagggtataagttgtataaggtgggtggtagcctggtgtgtgcattggctacgattcttccctctttcgttatcatgatgctgatagccatgttttttgcacagtttcaggataatgaagtgatgattcgtatctttaatggaatacgtcctgccgtggtagcattgattctgtttccttgcatttctgctgttagagctttgaaactgaagtatttgcaattggttgctcctgccatagccaccgtgttgatctggcagttcggcttatcacctatttatattgtgttggccggaattatagggggattggtatatacattatggttgaaagaaaaaatagcgaataaacaggtatgatatattggcaattactttgggtgtatcttaaaataggtatgtttggttttgggggtggatatgcgatgctttccctgattcaacatgaaatagtggatctccatcattggctgactcctcaacagtttacggatgtggtcgcaatttcgcagatgactccgggaccgattggtataaatagtgctacttacgtaggttatgcggtaacacaaagtgtttggggggctgtgttggctactgtagccgtttgtttgccttcttttattttggtgttgctcatttcttatttctttgcgaagtgtaaggataataagtatattaaagcggctatgtccggactgcttcctatgtcggtcgccctgattgcttcggctgcattgcttatgatgaatagagagaattttatagactataaaagtatcggtattttcgcagccgcctttttggttacatggaaatggaatcttcatcctattctgttgatttgtctggcgggcgtggtaggattcgttttatattgagaattcaaatatttgatta

SEQ ID NO: 4751 - DNA, 1077 bp, Unknown
  gut microbiota DNA sequence
tcagcgcttttccttcttttgtctctgttttggaaaacaaagagaaaagaaattgctcattattagcagtctctgtaatgcttaaatccgcataggtctgtttgtcagtagctagatataccataactgcctttaaaagttagtactcctgttttggcaaatatagggaaaagttttaaacaaacagcatttattctcatagaaaggcataggcataaacaaaaaaggcggttcgaaatcgaaccgccttccatattatatctgattctccaattagagtttcggaccagcagcaaccaaagccttaccagcttcgttaccagtaaatttagcgaagttcttgatgaaacgtccagccaaatcttttgctttttcttcccattgacaagcacattcgtaagtgtctcgtgggtcaaggatcttcggatcaacacccggaagttctgtaggaacaacgaagtcgaagtaaggcataaccttagtaggagctttgtcgatagaaccgtcaaggatagcgtcaatgataccacgagtatctttgatagagatacgtttgccagagccgttccaacctgtgttcaccaagtatgctttagcaccagctttcttcatcttcttaaccaattcttcaccatatttagttgggtgcaatgacaagaaagcagcaccgaaacaagcagagaatgtcggagtcggttcagtgataccacgttctgtaccagccaatttagctgtaaaaccagaaaggaagtagtactgagtttgttccgggttcaggatagatactggaggcaatacaccgaatgcgtcagctgacaagaagataacttgtttagcgtgaggacctttagacaccggtttaacgatgttttcgatgtgatagataggataagaaacacgagtgttttcagttactgacttgtcagcgaagttgatttcgccttcagcgttaactgtacagttttccaacagtgcatcgcgtttgatagcattccagatgtctggttcgctttctttatccaagttgataactttagcgtagcaaccaccttcgaagttgaatacaccttcgtcatc

SEQ ID NO: 4752 - DNA, 750 bp, Unknown
  gut microbiota DNA sequence
gacgtttcgggtcagtagacaaagtagtcttacctgtaccagacagaccgaagaagatagcagagctttcacctgctttgtcagtgttagcagagcagtgcatagaagccataccgttcaaaggcaacaagtagttcatgtaagagaacatacctttcttcatttcaccaccgtaccaagtattcaggataacctggatcttttcagtcaagttgaatacaactgcagtttctgagttcaagcccagttctttgtagttttcaaccttagctttagaagcgttcatgataacgaaatcaggttcaccgaagttagccaattcttcagctgtcggacggatgaacatgtttgttacgaagtgagcttgccatgcaacttccatgatgaagcgcaatttcaagcgagagttttcgttagcaccacagaaagcatcaacaacgaacagtctcttgttagacaattctttagttgccaattctttaactgctttccaacattttgcgtcaactggtttgttgtcgtttttgtattcttcagaagtccaccatactgtattttcgctggtttcgtcttttacgaagaatttatctttaggagaacgtcctgtataaacgccggtcattacgtttacagcgcccatgttagttacctggcctttttcgaaaccttccaaacttggttttgtttcttcagcgaacaaaacgtcataagacggattgtgcacaatctcggtcacacctgtgataccgt

SEQ ID NO: 4753 - DNA, 42392 bp, Unknown
  gut microbiota DNA sequence
agtcattacgtttacagcgcccatgttagttacctggcctttttcaaaaccttccaaacctggttttgtttcttcagcgaacaaaacgtcataagacggattgtgcacaatctcggtcacacctgtgataccgtacttgcttaaatctaaatttgccattttttttgaattaattaaaattggtatttcgttttattatctcttttcacctgaacatgaggagctttgggtgcctccttgtaaatccgggtacaaaagtaatactttctttgaaaaggaagaagggattagagaaatttttccctaattgaatctcttttatagattcctaacaatatctgcaaactgaatattgcaatttgaaagattatcgtttactttgcaagccagaacgttctcaatacgatgaaaatgagattaaattatgattaaactataatatgaaagtaattgattttagccaaacaaattcgattctaaaccagtacatatccgaaatcagaaatgtagaagttcagaatgaccgcctacgtttccgccgtaacattgaacggatcggagaaatcatggcttacgaaatgagcaaagagttccgatactcagtaaaaaacatccggacaccactgggcattgctcccgtcagcacaccggacaaccagcttgtcatcagcaccattctccgcgccggccttccttttcaccaaggcttcctaagctatttcgacggagcagaaaatgcatttgtgtccgcctatcgaaaatataaagataccctgaaatttgatatacatatagaatatatcgcatctccgcgtattgacgacaaaacgctgattatcaccgatccgatgctggctacaggcggcagtatggaactgagttatcaggccatgcttaccaaagggcatcccgccgaaattcacgtagcttcgatcattgccagccaacatgcaatcgatcatatcaagagcgtatttcccgaagacaaaacaaccatttggtgtgctgccatcgatcctgaaatcaatgaacattcctatattgtaccggggctgggcgacgcaggcgatctggcttatggagaaaaagagtaatttcgattaaagattccttcgatattgctgcggcgacatccccatttgcttcttgaagaatgtgccaaaataagaagcattggggaagccgaattcattggaaatctcctgaatatttttttgcgtattcttcaacaaagagatacacttacggataatcgccttgaatacaagttcctgcaccgtatacccacagatgcttttggaaagagccgaaaggtatttcggagacaaacagagtttatccgcatagaattccacactcctttcctgcatataatattgctctatcaactggatgagacggacaaatatctcatttttccgcccgcccgtttcctgtccggcactaatcaatttacggttatagaccgaacaaatacgataggtcagtgccagcagaaggagtttctgctcataaaggctaaacacactctcctccatttccagcacactgtctatcaaagacatatacttcataatctcatcttcctcgccggtattccatacacaggaaagttcaggggtaagcttcgaatacatatacatggaaaccactgagttaccgataatgtcacgtataggttctatctgataggcaagaataagaatttccatatcttcggtctcttgaaacacttgaaaccaagactcctcatggataaacaaagtctcacccgccttggcagaagcgcacttattatcaagagaaaactggaaactaccttgccgacagacaatcaaaccaagcccctgcatcagaaaaggttctttcaaagaagatggaaaacaactgagcacacctcccgaactgcatatattcttcccgcttttcagatcgcggtcaagctgtaataaacgttcctgctgagtatccataacactgactcactgataaattactattgaaaaacgatactaagttagcaattttcgtttgggataaggcactacgagcacaaaaatcatacaaataacgcctgcataaatagtccaccctgccatttctttcacagcagagagcgtagcctgcacctgtatccgccccttgacggacatggcagccatgttatgcgcttccgtttcactctttccctgatattgcattccctgcacggtattggtatacgaagcagaagcttcggggtttaccagatcaacattttgtgcataacgggtaatataatgttgctggcgctcctgcagtacatttgaataaatagcccctccgatacccggtcccagtaccatacggacggtaagcatgatgcaaatccaggtcgaaagatatttgaaaggcatccgctgattggcatatgctgccgtcaatgcatataaaatcatcattccgatggtacgaataattacgggatacttcattcgttcgtaaagtccggctgtctgcacttcgaagtacatgaatcctgccgacaatgccagaaagaaaaagccaagagcaaaaagatatttcagatgcacccctttagaccccaatacaatggaaatcaaggcaccgataaaataaccgaccatacaccagtttgccagcgatgcattctgcaaattatccaggtgcatcccgactcctgcatacacattgacaaacatcgcgctggaattgatgatcatcagcaataaataaagcaaagcccccatacgaatggtacgcagcctcaacgcccccaaaataaagtaggaagaccgccgggtaacatccatataaagaaaaatcccagcaaaaaggatactgatcgccgttgcccagcaaatagatggatcatcataccaatccagcaccttgccataaaccagcacataagtgatgcacgtcaatgatatgcaaaatgcggtcacattgccgaatttgcggaagttgatagggaaacgtccggcaaaaccatgattaggcatcgtaatgaacagtatcagaatggacagcagcagaatacccatcataaaataatatacatatttccattcgtattcgaaagccagccaagccgttagcgccgtacccatttgccccaggatcataaaaaacagataaactaccggctggctgacacatttttcgatatccagtttattccatcccgtcgcgtctttcggttccatgccgggagtaatattacgcgttgcctccatgccaaaagcatatttgatcagcgtaaacagattgaccatcatcagtaccatacgcaggaaccctgtcagcaggctgcagagtgccagcaaaaagatactgtcggttttggcacatacatagctgaatacatacatcagtgcaaaacctgcgatacacatcagtttctcccgtcgtatacaaaccagttcatacaagaagggagcaaatgccgccataccgatggaagtcacaaaattggcaaactgaatatgctcggaaataatacccaagccgctcatcatctcggtactgttcacggagtataccccgcccaccgaaagaatcggcaggaaaaagaacagcagaataataatacctatcggtttgggcacccaattgtaaaaaggataatttctaggacacgaaggcatggctatcagagtttagcttttactactaccatcatacccgccgccagcttatcattatcttccttcgataaatccgtaaaatcaatacggacagggatacgctgctgtattttcacaaagtttccggcagaattgtcagtcggcaccaacgaatatttagaacctgtcgctccggaaatagcagtcactttgcctgtaaactctttcttactgatagcatctaccgtgatagccaccttctgcccgatgcggagattctctatctgcgtttctttataattagcaataatccatttttgtgtatcgggcaaaatatatgtaatgcattgccctgctgtaatgaactgcccttcttccagagaacgtctgcctaacttgccatcgcaaggagccagtacaaccgtatacgaaagattcagccgtgccatttcaagcgcagccgtagcacgctggatggcagcttccgtattctcacgacggtgagatacttcattcactcccgaaagagccgcctcccgctggcgcctggttgcttccagcttcttaaaggtagcttcatactctgttgtaatctgttccaactggataggtgtcgccgcatttcgtttgaccagattttcataccgctgacggtctttctccagttttgctagccggatttctatttcagctatagacgcatcatacacagatgcagtcgtttgtgtagtctgcaaggtagcatttatcacagtggcgcctgcctgcgcatccttcaatgcagcctcagcttccatcacccggattttatattcgcggtcgtccagcaccagcaaggtatcacctttgcgtacctgctgatgttccgtaaaataaatcttattaatatagcccgatgcacgcagattgacaggtgacacatattgctctatctgcgcatcattgctggtttccgtctgcttatagcccagaaagagaaaaacaatttcaattactccccaaacaatcacagcaactccaaacagacttactataatctgccagcggcgtaattttctcattttcttagctttctcctgatgcgtactggagactgtattattttccattgtttccatatgaatgattcaattagttatctgttatttgaacaaggatgagatctgtccggttagtttcagtaacatcaggttggtcacccgataattataatgtgcactaatgtagttgttctgtgcctcgctcatccgcatttcatcctgcagaacttcagtcattgaagtgattccttcccgatagcggtcggtagtaaccgtatacacttcttcggcaagcagataattgtctttctgttttttaaagttccgctggttattcatcaagtcatttacagcattcaaatactgtgtttgcagattcttccgtgtatccaaccgtgaaagtttcatggtttcgatatcgatcattgctttccggatcttatacttcttatccaagccatcaaaaataggaatacgcaaagtcagtcccactccataagaacggaaccaatgattggacggaccggaatgaaaccaatgataagcctcatcagtataagcggcaaacctccagtttcccgtcagattgagagaaggaatatagccattactaatcaatcgtttctgccgctctgccagctgcacctgtgattggagcaactgaagctcatagaggttttccgacagtccggtcaaagcaaccgtagcgatactgtccgtgtttaccggcaataaaccgatttctttttccgccggataatccatgatatacttcaacatattaagttgttgtgtcatcatcgcctgtgcattgtcatactgcactttcagattttccagattaatattcacccgcttcagatcaacttccattgccattccattatcaaagaaagcctgtgtgatatctctcagttcttccaatcgggtgatattggcttttatcaatgcaatctgttccgcagtaacctgtcccagatagtacattttactgatctgcaagatcaaatcttcccgtgccttttcatacgaaagccggctcatctcatccacaatctctgctatggaaatcgaagtatagagagtctgattataaagtggcatctgcaattctatcccggcattggcactatattgcaacgttcgggtaatattataaggtactccataggaagaaccgtcagttactgagacaggcggatcgatattatcattaaagttggcaaagccattgatttgcggcaacagcttcacccgattctccgaaatgccatacttacttttctgcatcgcttttcgttttccctgtaaagagagattgttctcaatccctatacgaaggcagttctccagagtcagaatattctgtgcgcctccatgaatggcaaggaggcaaaaaaaggtaaaaatgaacaatagtcttttcataataatcgctctatattcaggcacaaatttaatgggttgcgacaaaatgggactatccatatatcgactgtttatgttcatattttcctttttcagtcctgatatccaccttaattattataatatcactatatttaatagacaaatcttcgccctttgtcgatttccttttcttctgtttaaagaaccacttaactttggaatataaaatcaattaacagcaaaacagcgtttgtttttcataattttttagtgaatgcataagcggctctcttcgggatgaagagagccgcttaaggtatatagagtacaatatagtacaagatcagaaaaaagtttaagagttctcagcctccttttttttcggagttattaacttcttcttgctgaaccaaatcagaatcatcaccccgatcagcaataaagccagtgacgcataagctatgctttccgtaacatgcaagctctgcgggtcaaaccacatctcaatcgtatgctggcctgcgggaacattcatcacacgcaagatatagtcagcacgggcaatgtccaccggctgtccgtcaatcttggcctgccagcccggataataaatctcagagaaaacagccactccatctttagcagaagaagtttcatataccaggcgattcggttcatagctggtcagacgaatggtagataaggagtctttgtaacccttcgtcacacccttcaactgatctttaaatttcgcatcaaccactgctgtttccgttggaagaatatcattcagcgcatcaatctcttcatttgcattattgacatactgcaccttatccacaaaccaagcgttaccatacgcataagggttttcaacaggaaccgtctgtccttgctgtccggcagggaaaataaagtacttcgtattcagcatattcagcacacggaatttggaagcgtccacactatccatcgcaccgcctgcgccggcaacttcctgataggcatccttcatttccggagttatatgatgatcgatcatttcctgataacgacgcaacttggccgcatgataaccacccacactcttatgccaatatgaggtattattttcattgaaagtattaccgggaaatcctacgaaattcaacaccctataattcaaagccgtatcctgaagaattatctcatccgtctgagttttaacgaatgctcctgtctggtttgacttcgatacaaattgttcatcattcaaatagcgcttattgacagtccacatatcaatcagacacagaagcacgatacctgtcatagtaaaagaagccttcaactttttctgctgataaaggaataataagaagcatcctactactataataaagaaactgcgccatgcatccgaagtcagcattgccttgcgcatttcggccagattcgtaatgatcggagataaatactcggcaggcagtccttgctgcagagctgccatctcttgtgccggaatataactagagaagaaaactcccggggcaacagccagaatcagtgaaacaccggctgttaataccaaagtgataattactcctgtccgattttctttcaactttaatatttccggtttagccagcacttcttttaaggcaaagaccgctaataaaggtatcgtaaattcagctataactaggatagaagatacggcacggaacttgttatacatcggtacataatcgataaaaaagtccgtaagtcccataaaattctttccccacgaaagtagaatagagaagatagtagctcccagtaaagcccatttcagcggtcctttaacaataaagcaccccaatataaacagaaataaaacaaaagctcccacatagaccggtccggaagtcatgggctgatcgccaaaatactgtgtcagctgcgaatagatgttactatacatcggattcgcctttgccatggcagtctcattcttggataaaggaaccgatgcccctccctttacattcggaaccagcaaagtaagcgtttcaccaattccataactccagttcgttatatagttacggtccagtccgctgctggtctgattggcagcaggtccttcctgtttcagttcactctttccgcgcatagtctccttactatactcataagtatggtatagattggagaggttcgcacacactcctatcatcgcagccaatgccagaacggcacttgccttgaaaaaatgcggcaactccttcttcttataagcatcttcaaagtaagctcctacaaaaaacaggatgacaaacatgaagtagtagctcatctgaatatggttcgactgaatctgaagcgcgataaacaaagcagtcacaatccctcccaacagatatttcttccgataagccagtacaataccggcaatcgtaggcggaatataagccaatgtgacaaatttccagatatgccctgccgatatcaaaataaagaaataggaggagaaagcccagataatcccccctaaagcagataaccagacagacaacccgaatgcccgcaaaaggatataaaacccgagcatcatgatgaaggtcagcaccacataagatggaagatacaagtgatagatgttttctatccacttcagcggtttggtagaatcataactcggagacatctgataggtaggcataccaccaaaaagagagtttgtccagcgggtacgttctcctgtacgttcaagatattcctgagcttcttgaccggctcccactccagccaccgtatcgtgctgaaacagaatacgactttcgatatcagccggaaaaaaataagcaaaagaaaggatgataaaagctaaaatagcaattaagtcgggaaggaacttcttcataaaattgacaattgacaattgacaattgacaattgatggtcaacaataacagcccggcagatcactcgttccatatagctgttcattgtcatttgtcaactgtcaattgtcaattaaattagtatctataatgttcagccttataaggtccgtctaccgatacaccgatataagcggcctgttccggagtcagcttcgtcagtttcaccccgatcttttcgagatgcaggcgagccacttcttcatccaggtgcttcggcaagcggtatacatttacttcgtatttcttgttgaacaactcgatctgggccagcgtctgattggtaaatgagttactcatcacgaatgacggatggcctgtcgcacatcccaaattcaccagacgaccgtcagccagcaaaagaatgctgtgaccatccgggaaataatagcggtctacctgcggcttgatgtttacacatttgatgcccggataatgtttcaacgcatccacctggatttcattatcgaagtgtccgatgttacatacgatcgcctgatctttcattttctccatgtggtcaatacgaataatatcgatattacccgtagtagtcacgaagatattaccttcggcgcaggcatcttccatcgttacgacttcgaaaccttccattgcagcctgtaatgcacaaatcggatcgacttccgtcacaagcacacgtgcaccataagagcgcattgaatgcgaacatcccttgcccacatcaccgtaaccacatacaaccactaccttaccggcaatcatcacatcggtcgctctcttgataccgtcagccagtgactcacgacatccgtagagattatcaaacttagacttggtaaccgaatcgttcacattaaatgccgggaacagcaatttgccttcttcctgcatctgatacaaacggtgtacaccagtcgttgtctcttccgatacaccgcgcatttcttcagccacacgatgccagcgggtcttatcctcagccaatacttttttcagaatggcattcagttcgatttcatcttccgcatgcacttccttgtccaatacggcagcatcattctcagcatcataaccgacatgaatcatcatggtagcgtcaccaccatcgtctacaatcacgttcggaccttttccgccggggaagttcaatgcctgcaatgtgcaccaccagtagtcggcaagattctcgcctttccatgcaaataccgcaacaccggaagcagcaatcgcagcagcagcatgatcctgcgttgaatatatattacaagaacaccagcggacttcagctcccaatgcaaccagtgtttcaatcagtacggcggtctggatggtcatatgtaatgatcccatgatacgggcaccttttaacggtttggattctccatacttttcgcgtagagccatcaggccgggcatttctttttctgccaaatcgatttccttgcgtccgaaatcagcaagtgtaatatctgccactttataaggcagagtagagaataattctgtagacatattgtaaatcatttaaaatgtaattggtgcaaagatagaacattctgattagtagggcaaaagctatccttcttttttatattataataacttgggagttcgcctgtttcttgaatttttattctatatttgcaacataaaaatgcattttctacaacaataaaatagttattattcatcttctatggaggattacaacaacaaaacaaaagcggagctgttagaaattatacaaaatctcgaaaaagaagtagagcagctttcctccgaatcagtctccggcagaaaagaacgctttcgcgacaggtattccaatcggatattagataatctgcccgatatgcttaccgtgctcgaccgcgatgccaatatcgtggaactggtttcctccccgtcaaccaatcacgtagaaggtactacagcagacagcattacccaatccaacataaaagatattcttccggaagatgcgtacaagaacatacgcaagaatatggagcaagttttccgttccggaaagagcgccatcgccaggcatgacttaatgatggacggtgtaccgcatcattacgaacactggctttccctgctcgacaaagaatacctgctatgtatgtgtcgggatgtttcgcaactttgggaaacagagcagaccaatgccgaacaacaaaatgaaattatgcggctcaattcattgatggaagccatagtgaataatgttcctgtatatctattcgtcaaagactccggaaatgatttcagatacttatactggaataagacttttgccgattactccggcatccccatcgagaaagctatcggcagaaatgatttcgagatcttcaaacggacggaggatatggagaaattccgccttgacgatatcagagtgctaaaagaaggaaaactggactatttcgaggaatatatggctgcttccggagaaatccgcacgataactaccatgaagcgcctcgtcccatccagtgacgaacatccttatattatcggtatctcctgggatatcaccgaaattaagaaaacagagaaagcactggatgcagcccgtatcaaagccgaagaagcggaccggttaaaatcggctttcctggcaaacatgagccacgaaatccgtaccccgcttaatgcgattgtgggattctccaaactgatatccagcacaaataatgaaaacgagaagaatcagtatgccgaaatcattgaaagaaattctgatatgctgctgaatcttttcaatgatattctcgatttatccagcctggaagccggctctcttaaattcaacattcagccggtcaaaatactggatatctgcctgcaattagaacagcagtattgtcacaaaacgcaggctggcgcaaagctgattctggataatggagacgccaatacatttgttttcgcagactggaaccggacgatacaaatcgtaagcaacctgctcagcaatgccgtaaagtttacctcgcaaggagagattcatttcggatttctcaataaagagaattttgtagagttctatgtgagagataccggcatcggtattcctgccgaaagagccgctagcatttttcagcgtttcggcaaagtagacgacttcgttcaaggcaccggactggggctcaccctctgtaagatgctggtggaaaaaatgggtggtcacatccgggtatgctcaaaagaagacgaaggtaccaccttttatttcacacttccgctagccaaccggtaaattatatgcgtcatatacaaaagcggtggacatctttacaatgtccaccacttttgtatttatgaagatagctgttacttcttttcttccttctgtacttttgcacttagcatttccttatacttcgcaggatcattcaatacctttattgcttcctgcaaatcatcatcatccttcagctgctcgataataccacctctctggaaataataacgcttgataatttcattagcaatcattctctttatatccttagagaaataatccaggtcacggtcgagattatgattcaacttcttttccagtgccttgaactcttcggcagcatctgtcatatagccctcgaactcagcagcctctttcagtgttttcagaatcttctcactttgctggtcatatttaaaatcggccttcttcaccaattccttgaaatcattgtagtcagcatccgtcactacaaacttttcaggagcagccacagtaggatgcttcaagcagtattgagtcgcatagtcaaaaatcagattatcacgtaccagatagaacaagatattcggcagtttttcctgcttgacagtaatatcaggcataacaccacctccgtcacgtacttcacgtccggcagcagtatagaatacgttagtcagactgtcggggatcgttcccacacttccatcttcgttccggtgcttatagtcgatcgcctgcacacaacgtccgcttgggatataatatttggaagtagtcactttcatcattcctccataaggtaaagaacggggaacttgtacaagtccctttccaaatgtacggttaccaacaataatggcacgatcaaggtcttgcaatgagcccgacaggatttctgaagcagaagccgtaccactgtttaccaatacggcaatcggaatatccagatccagcggttcacgcaaagtcttgtatgtgttgcttgcctgtttcgtctttcccttggttgttacgattacttttccacggggcaggaagtaattggctatttccactgcttcatccaacagaccgccaccgttattacggaggtcgatgaccaaagaagtagctccctgtttcttcagatccagcaatgcttttttgaaatccttggaagggttgccggagaatgtgctcaggctgatatatcccaccttattatccatcacggtagcatatgggatggcaggggtctgaatagattcacgtacgatagtaaactccatcggggtttgtccgcctttctcattaggacgctccactttcagtttaaagctcgtacccgcctgtccgcgcaacatctggctgacttccgaattattctttcctgccagatcttttccgtctatttccatcaggatatctcccgccttcagtcccgctttggccgccggagttccttcgaacggttcggcaatcatggaacgtttcaacttcgtattataggtaataagagaaccgatacctccaaagcttcctttcaccatctgttccagttcgctttgatcttcctccgggtaatattctgtataaggatccagcgagaaaagcatattgtcgattccttcgcgaatggtcttgttcggatcaatggtatccacgtagaacatatccagttctttcacaatcgcattaaatgtatccagattcttggcaatctggaaattgcggtcgtctccactcttaaaactaaagaaagctacagtagctattacagccaccaaaacaagagctatccgcctattcagcaattttttcatatatctttcattaaaatgagacgtaaaagtaactcaaaccttggttattccgccagaaccttgttaatatttaacttaatttcatcccagcgctccggagagattgttgttccaatcacctgaataacatttcccgagagaatagaaccaatttttgcacatttttcgagcgagtatccgcacgtcagaccatacagaaatccggcagcgaaataatcgcctgcgccggtggtatccagaactttttctacaggaatagccgacactttaatttcttccgtacctttacggatataagatccgtttgctccaactttcacaatagcaatgctgcatttcttggctatcactctcagagcttcctctggttcttcgccggtaaatgctttcgcttcttcctcgtttgcaaaaacgatatccacatacttatttattaataaggagaaaaattccaggtcattctccacgatattataacttgccatgtcgagacagatctgcagaccggcctctttagccagttcaatggcatgaagaatcatttcgtgatcctgaacaaggtatccttctataaataggtatgcatatcctttgaacatctccaatgtcagatcttcggctttcaaagaagcagctgctcccagataggtaccaaaagtacgctctccatctggagaaataaaagcggatgccactcccgaaggaagatgttcggaggtcaataaattgtcttcaatattatttttctgcagatttttccgaaaaaaatcgccataatgatcatttcctacttttccgataaaacctgttccggcacccagacaagcgagtccaagtatggcatttcctgccgatccgcctgttgccagatgcgttttcatttgtgaaaattttgtgttaatctgctgtaacttagcgtcatcgatgagttgcatgcttcccttgggtaattccagttcatccaagagtgtatcgtctttcagggttgcaagtacgtctatcagggcgttgcccaatcctattattttgtccattctcaatattttttttgcaaagatattgcatatttcaaaaaaacctactacttttgcatcgcaattgagaaaaacattcttccttagctcagtcggttagagcatctgactgttaatcagagggtccttggttcaagtccaagaggaagagcaaaactgaaattcttgattgcaacattcttccttagctcagtcggttagagcatctgactgttaatcagagggtccttggttcaagtccaagaggaagagcaaaaagaggtgtatcgaaagatagacctcttttttgtttctgctcttctcccccctgcttcgaaaatagagggtcagtccgaaaaccgaaactctcatccccttcttttattcacaaaaacattcttgtcttttgatggtctataaaactttaaagattcaaaggttaacaataaactttccatctgaataaagtaagttctttgggtacatgaattaattcgtccggctataggcattctttcgtccgcctatagccggacgaaagtttgcctataggcaacgttgcgtttgcccataggcggacgaattaatttatgaagagaaagtacttatttgtagaacagcaacaacataatgtaagcattggcattcattatagtttatatattaaagagagtcttcgggaagacgacaagctaccctattctgccatagccaacgtcaacacactaatccgtactccttcaatctctgccagccgagaagcgcacgctacggtagttgctccagtcgtcaacacatcatctactattaatatatgctttcctgccaaatactccgaacgatgcaattcgaagattccatctacattctcccaacgttctaaagctgacttttgtgtttgcgtttccgtattcttccggcgtatgattgcttcggtatccaccggaatacctgttacggccataatcccgcgcgatatccattcactttgattgtagccacgtatctgctgtttcttcttatgcaaagggatgggaatgattacatcaactccatgaaagaagtcggaagcctgcaattcggatgccatatatcgtcccataatagcaccaatttctttttgtcctccatatttgagttggtggagaacttgccgaaaatcacttcctttgcgataaaagaaaaaagaagtggcacgttccagaggaaacttaccccaaaagagtttttctaccggattgtctttccgaagatgataatcggtacgaggcaagtttatattgcacatggtgcaaatacactcttctcctttagccaacgatccgccacaaacgacgcagcaacggggaaaccaaagggacaaaaaagaataaagccaatcttttataagtaatgtgtgtttcatagtagtagctatttatacaatcgcagcagtcttacatatccaacggaggaacttctgctaagagtttcaaaaataaaggatgcaggtatccattggttgcaataatatgatgaccttctataaaatggtcgtcaccatagaaattagtcacgcgaccgcctgcttccaacacaatcagggcagccgccgaataatcccacttaccgataaacgcttcggcccatgcatcaaaacgaccattagctatataacagattgcagccgcagccgaaccgttcatgcgaatgcctcccacggctccataaaggttatcaatcagatggagagccgtcggtttatactgatcataattataaggtaattcagtaaacacaaatgcattcttgatatcccggacatccgaaacatgaatttcctcaccattcatgaaagcctttcctcctttccaggcatagaaacattcattccggcagacttcatacacaactcccaaaagcaattcggtacgactgcgcagagcgatgcatacacaataaggagcctcatcatgaatataattcgtagttccgtccaacggatcaatgacccagcagtaaggttcgtcctgataagtagcagagccttcttccgtaataaatcctgcttcgggcaacaaggcagaaagcgcttttaccaaccgtacttcagactctttatccacatacgacacataatcatgcgcatgtttttccataacacgctcacgacggaagtttttccgctcttctttcagaaaatgcccagcttcggtagctatgcggcatacttcaactgtaagttgctttaaatccaacatttcatctttattattaaaaagtacatcgaaggtatagcttttcttatgaaaaaccatccaaaatgagtattattttcagatagactatcaaacattcaattttcaaggcagaaaaacattcaatcacattataatatatttttctgatctgaggaaatgagaattccctgcaattttcagaacaggcccggcctcttcccacaaatatacgcaacaaagagctacagaaaacacaaagtgacagaatgccagatttgctttttacataaaaattcccgaatattgcaatctaatactaatgcaaagagttccctatgaaaagagtagattccgttatatccctgatatactcgttatctaaatcagaaaagaagcacttctccctacaggttatcaaggacaaggaggaaaaagactatctggtgatttatgatattatcataaagagtaaacaaccgaatggaaatactgtaaaagaggaattttacagacgcaagcccaatggctcatttgaagtatccattcaatacttatatgaaaagctgacggatacgttactcaccctgcgtaaaaagaaagatatctattacgatctgctgaataatttgtgcaaagcccgaatgctttatgaacgttctctgtttgaagagtgtttcgaaatactatccaatacaatagaacaagcacaattctatgagaacaacgaaattctgacgatagctttgaagctggaactggaatatctgctccgtctgaactttcccaacatgacagaacaggagctttttcacaaacacttcattcaaaatgaagctttgaaaaagattcggaaaatcacagagcaatcttcattacacaacttattgaaatatcgtttatctcatattggctccatcagaacagtaaagcaaaaacaggatatgaatgaccttatggtcaacgaactttatatagccgcttcttcagactccgaaggtaattttgaattaacacgaaaccataaactttttcaggctaattacctgatgggagcaggcgattacagagctgccttaaattcatacaaagaactagactcattatttgagcagaatcagcagttctggtcaaatcctcctatatactatttatctgtactcgaaggagtactcggtagcctgcggtctgtgagcaactatgacgaaatcccctacttccttgataaattaagaaagcttatatcagacagcacttcgctcgaatttaaagtaaatgcaacttgccttctcttccaatacgaactatttccctatctggataaaggagatttttcgaaatgtacccaacttatggcagactaccaggaaatactttatgataaagaagcctggttaggccctattcgaaaaagtgaattattgctttacaccacactcgtacacattggtaaccaagaatataaaactgctaaaaagtatatcagcaacgctatcatagaccataacataaagtatctgcctttaatgagaactattcgtctggtccgcctcatcgtcttttatgaagtgcaggagcatgagctaatccagtatgaatcccgttccatcacccgaagtctatcttcgcccaaagagcagacttttaaaacagaacgtatcattttatggtttctgaataaaagaaatattcccatcctgaaaaaagacagagaagcattttgggaaaagttgtctcctgagattcatgaattatataataataaatatgaaagtcagcttttacgcctctttgactttacggcgtggatggaatccaaaattcggaaagaaaaactgtctgaagtcctcagagcacgtgctagcgcaaaagaatgttaaagagtaaggtgtctgattcgtatttcagacgataaaaacactcttttcaaatctccattttctctttgtaattatataaattcgcttcacattacctctatattctctcctctatacaaggaaaatccaatataagatatcatttttgagattatataaaccaattattaatgtagaaaactatgcatgattattgctttcatttgcatagtcttaatttttaatactatggaaactatatcaattcatagacccaaaattgtagtcatcggtagttgcaataccgatatggtcgtgaaagccaacagactacctgttcccggagaaaccatactaggcggaaccttctacatgaatcccggtggcaaaggagctaatcaggcgattgcagccgcccgactgggagctgaagtcaccttcatatccaaaatcggatatgatttgttcggcctgcaagcattggaaatatacagatcagagaaaattaatacggaatatatatttaccgaccagaaaagtccgtccggagttgcacttatctccgtagattctttcggtgaaaatagcattatcgtagcaccgggagcaagccgttcgctttctattgaggatatcaataaagccgaagaaaaaatcaaggaagctgatattattctcatgcaacttgagattcccatagacacagtggaatatgcagctactattgcttgcaaatatgggaaaaaggtaatcctcaatccggctcccgcgtccagcctgagcaactcattcttaatgaacgtgcacaccatactccccaaccgcattgaagcggaaatgttatccggaatcaaagtgatgaatatagaaagcgctcatcgtgccgctcaggctatcggagagaaaggtatagagaatgttgtcattactttaggtaaagacggggcttacgtaaaagagaaagatgaatataccatgattcccgcaaaggaagtagagacgattgacacaacaggtgccggagatgtattttgcggagcattcagcgtctgcctgtctgaagggcattcactcgctaaatctgtgaaatttgccaatgcagcggcagctatagcagtcacgcgaatcggtgcacagagtgcgattccttataaaagagaagttgtgctataaacgagataagacctaggttaaacacataaatctgttcaaatgaaagtagtagttattggaagttcaaacatcgacatggttgcacaagtcaaccatctcccggcgcctggcgaaacagtcggagatgccagtttcatgcaatccctcggggggaaaggcgccaatcaggctgtagcagcagcaagactcgggggatctgtaacgttcattacctctttgggaaatgatatgtatgcagaaattctaaaaaaacactttaagaaagaaggtatcactactgattatatcatagatgatgttaatcagcccacagggactgcactcatttttgttgccgacagtggtgaaaactgcatagcagtagctcccggagctaactattctttattacccggttcaattattcatttttcaaaggtaattgacgaagcagatatcatagttatgcaagccgagattccttacgaaacgattaaaagaatagctcttctggctaaacaaaaaggtaaaaaggtattgtttaatcccgcacccgcctgcctgattgatgaggagctgatgaaagccattgatatactagtcgtcaatgaactggaagcagccttcatctcaggaattgaatatacaggaaataatcttgaagaaatcgctctaagcttattacaggcaggtgcacgcaatgctgtgatcacattaggaagtcaaggtgtatatatgaaaaacgacaaagaaatcattcagcttcccggatacaaagtaaatgcgattgatactattgcagcaggtgacacgttctgtggtgcattggctgtaatttgtgcccaaagggaaatagaccgagatgcattgagttttgcgaatgccgcggcagctatcgctgttacacgttctggtgcccaaccgtctattcctactctcgatgaagtaaaacacttcatgttagaaaaagaattagccttatcattcaacttttaaatttcatggattatgaaaactaatcgacactctactctcttaaagaaagctgtccacctgataacttataactcaagtcataagcttatctgcctgctgggctacctacttttatgttcaatgaatacatatgctcagaattatgtatccggaacagtaaaagataataatggagaacctctactgggagtttccataaaagtaaaagatgggaatatagtatccggaaccgtcactgactttaacggacactaccaagtgaaagcggatccaagttcaactattgaattcagttacatcggatttaaaacagtccagtttacagtaggtgatagaaaaatgataaacgtaacactgggagttgacgacaatttattggatgaagtgatcgttgtaggttatggtacccaaaagaagattaatttaaccggttctgtcggagtcattgactcgaaagccttcgaagcaatccctgtatccaatgcagtccaggcattacaaggacaggttcccggtttgaatatttatagcaatcagggaggaggtctcaatcagaaacaatcgatcaatgtacgtggagtcggaactatcggagaaggttctacaggaagtgccctagtcttgatagatggtatggaaggagatatttattccattaatccgcaggatatagaatctatttcagttctgaaagatgcggcagcttcttctatttatggttccagagcgccattcggagtaatcttagtaacgaccaagaaaggaaaggccggtaaagcgcaagttaactacaacaacagttttcgtgtaagtagccctatcaacatgccttcttcattagactcttacacgttctccttatactataatgatgcagctgccaattccggatggggaccttacaactgggtctcggaagaaaggataaaccgcatcaaagactatatggccggcaagattaccgattctaccatccccgtgcccaataatccttcgttatgggcagacggatattcacaaggaaatgataatattgattattatgactattttttcaaagacaatgtctttgcacacgagcacaatatcagcgttactggcgggacagacaaaatacaatactatttatcagcgaactatttaggtcaggatggagagctcagaatcggagatgaatactcaaacagatatactgcatctgcaaaaatcaacgcacaattatcaaaaatagtatcagtcggattcaatactcgctttatcagaagtgactatgtacagccgacacatcttaatgaaagtttttttgccgaaatcggacgccaatgttggcctaccaaacctctctatgacccaaatggtattctatatgacgaccatgtgctccaaatgcaaaacggaggtgaaaaacaagaacgaaacacttggctctaccaacaactgaatataacggtagaacctatcaaagggtggcgactgattggagatttaagctatcgatacaatacacaatattcacactgggattacttaactgttcatcagacaggtgttgacggaaagactaagggcaatacatggaataacgattcccaagtacatgaaggcacttatgccagcgattattttaatgtaaatctctatacagattatgcaaagacctttgcaaaatcacataatatgaaagttcttttcgggtttcaagccgaacaaaataattataaagatatagctgctgagaagctaggagtcatttatccgggaaaaccgactatcaacacttctaccggaatggattcaaataaccaaaaagttgctccgaatgtagcaggtggacacaacagatgggctaccgccggattcttcggcagattgaattatgattacctggaaaaatatcttctggaagtaaatctacgctatgacggttcctcacgatttcgtagtgacagtcgttggggatttttcccttccgcatcagtaggctggaacatagccagagaaaaattcttcctgcctgtcagcaaagttgtcaacacatttaaggtcagagcctcttatggtagtttgggtaaccaaaatacatcttctttatatccgacttattctacaatcggtacaggaacaggatcatggatcattgacggaacattagccaatattgcctgggcaccttcactcgtcagctataatctctcctgggagaaaatccgtacatggaatgccggagttgactttggcctgtttaacaatcggctaaccggctcttttgattattacattcgtaaaactgacgatatggtcggcccttcggagaaattgcctgtagtccttggaacagccgttcccagttccaataatacaaatcttaaaacattcggatgggaactggaactaatgtggaaagaccggttaaataatggattgaattatagtgcccgctttacacttgccgacagtcgtaccaagattactcgttattcaaatccttccggactgatagatggattttatgccggaaaatacgtgggtgaaatatggggatatgaaacgataggcattgcacaatctgaccaggaaatggccgaacacatcggaagattaatcaacggtggacaaagtaatctcggacaagactggaaagccggagacattatgtataaagatctgaatgaagacggaaaaattgatgccggaagccgcaccttacaagatcacggtgatttaaaaagaataggtaactccacgccccgatataatgtaggactggaattagccgccgattggaaaggattcgatatcagaatgttctggcaaggaacattgaaaagagattattttcagggtagttactacttctggggtgcaaacggtagacaagggccctggttttccacagcactaaaaggacacgatgattatttccgaaatgacgaagccagtccattgggaacgaatctgaattcctactatccaagacccttattcaacaccgataaaaaccagcaatcacaaactaaatatttacaagatgcatcttatctacgtctgaagaatctgcagataggatatagcttgccacacaacatcgtacaaaaaatgggaatgcagcaccttaggatattcgcatccggtgaaaacttgttcaccattacgagccttattgacttcttcgaccccgaatcaatcgaaggcggtagttggggacacggaaacgtttacccactatcccgaacattctcttttggattaaatgtcacattctaaaaacaggatattatgaaaagacttacgatatcaaccttattgagcggagtgctctttttgacaagttgcaatgatttcctaaatcaagaacctcttgatcaactttctccaaatgaatatctgacaacagaaagtaatattgcagcttttgctactgatcaatatcaagtgctacctactcatggcacctatggatatggaacttttgaaattgacaataacacagataatatggccggtatgcaacctaacgtaatgtatgcacccggatactggaaagtaggacaagaaggaggctcatggtatttcgctgatatttaccgatgcaattatttctttgaaaatgtgcttccatcgtatgaaaacaatgccattgtcggaaacacgaccaatatcaaacactatatcggagaaatgtatttcttcagagctttcatgtattttgaaagattaaaatcattaggcgactttcctattattactaaaacttatcctaatgaacgtgaagctctgatagaaatcagcaaacgagccccccgaaatgaagtagccagatttatcttatctgatctggacaaagctatagaaatgatgcaaaacatagctccttccggaggtaagaaccggctaagcaaagactgcgctatccttctcaagtcaagggtcgcactttacgaaggctcatggctgaagaattttaaaggaacagcttttgtacccaatggaccgggatggccgggagcaaataaagattataatgctaattactcatttaaatccggaagtattgaaaaagaatcagagttcttctttgatgaagctattaaagcggcacaaatcatagcagaaaaatataatatattaactgccaatacaggagtattcccacaaacttcttcggaacctgaaaatccttatttcagtatgttctgcgatattgacatggagaaatacaatgaagtacttttatggaggcgctacaacacaggattaggagtggcaaatgaagtttgtcaatacggatgtgtcggcaacaatggagtaggcactactaaaagcatgattgacgcctttattcttaaaaatggagaacctatttatgcatccccgatgtgggcagatgaaaactcatcttattggggagataataatatcattcatatcactaaaaacagggatacccgtgcagacatcttcatcaaaaagccaggacagaaaaatttgcatactcaggcaggagatcatggggtagtagaagaatggggacccaatataaccgcctcttctgttacagaaaagtacaatacaggctatgccttacgcaaaggattaaaccctgacgggaaatacacaaataacactcaaagtattgtcggttctatcatattccgtacagccgaagcctatctcaactatatagaagcttattatgaattgcatggttcactcgactcctatgcagaaaagtactggaaagcgattcgtcgcagagccggcattgatgaggactataccaaaacaatcaggcttacagatatgtcaaaagaagcagaaactgattggggggcatattccggcggagaaattattgatgccacacgttataatatccgccgtgaacgaagatgtgagttgatggcggaaggtttacgtagcatggacttacatagatggcgttcaatggaccagatgattaccaaaccctaccatatcctaggaatgaatttatggcaggaaatgtatggctgggactggtataaagattctaacggcaactccattcttaaagaaggagaaaatgtttcaccacgtagcttcagtacttatcttgctccttatcacatcacagccaataacattgtttacaacggctataaatggaatatggcacactatctcgatccgatagcagcagaacattttctggttacttcatccggaggtgatttggattcttctcctatctatcagaatccgggctggcctatgacaggaggaggaaccccgcaataatccaataatctactaatttaacaaagaccaattatgtataaaagaatgataatactaacttacgcactggttttcttttcattattcgcaacagcttgttctgacaataataatgaaacatacgtcgaaccaatactttctcaaatagaagtaagtaaactagtgactgaaaacaacaaaacatatgtttctgttgacggtaaaccttttccgtttcttggtgcacaaatacgccttgatgcccttctcaattgtgacaagatgactattaatgaagtggaaaactacttcaagaaagctcaggaactgggactaaattgtgtacaaattccaatttcatggaatatggtagagcctaaagaaaacaagtacgattatagtatcgtaaactcaatcttgcagttcgtcaacaagtataatttgaaaatggaattactttggttcagtacgaatatggtaggagattcattctcctacctgatacctcaatatgtgcttcaagaatataacaaaaggctcagccggaatgatgaaggaaatttttggaactattatggttatcaatacaccatgattcttgatgatgaatggatactggagagagaaaccaaagccatcaccgccttatttaaccacatccgatactgggattctcaaaatggagacaagcaccccgttatatcagctcagatccataatgaacctgatgcgttaatgcgctggagaatcgaccaaaaagatttaaaatatcgggatgggacccctctaagcaaagagaaggcctggacaatgatcacaaatgcattaaatactgtaggaaaagctgtaaaaaacagttcttacagagtagtaactcgtgtcaatctaatttacggtgatggtattaatccatttccagaggctactaatgctcgccccaaagatgtattcgatcttcaaggcattgatttcattggcgttgatgcttataaagataatgttaaacatctcaaaaatgaagtcatggcatacgcatcaattgcaggaaattatgcgctggttgccgagaacaaaggtagttatgcaaacagtccgagtcttatcttgacatctttcgcattaggaggaggctatgatatttacgatttggctaccagtaacttctttatcaacaacaccactgaaccggaccaaattgaccacggaatttatacatgggatttacaagaaaaagattttacacctcctactcgtagtctcataaaaggcttggcggcagcttatatagatgttgccaaagtaaaaccggagaactttgcagcatttaatattaacgataatcagccaaaagacaaattagaacaactaatatgtactactggagcacaaatcacattccagacaaataatgcttctttaggtttcgtattagatatgcacaattatttactgatttatagcttgaatgactctcaattcaaactagagaatggtaaatttggagaaaccatttccggaagatatgatgtaaatggcacatttaccaaagaaggaactgcaactttagaaaatcagactctccatgctaaaggaggcgtactttataaagtaaattattcctcgcaacaatcattaaccagcaatacaattgagaatattggaaataacttataaaaacccaagatatgttcaaatatatagcaatcattctaataaccgtctctttattctgttcctgtgcacaacaaaaagagactacttctgcaattcctgtcatactcgacacggatgttggaaatgatatcgatgatgttttagccatgcaaatgctgcttaattatgagaaaaaaggaaaaattgatttgctaggtatcactataagcaagtgtaatccttattcactggaatatattgacgcttattgtcgtttcaacgacaaatacgacatacctttaggttatgcttataatgggatgaatacagacgacggacattatctccgccaaacgctggatactattattgacaacaataaaatattacatccaaaaagaagcctaaaagatcatattctggaaggatataaactgttgcgtaaattgctggcagagcaagaagatcattctgtggtatttatagccttaggcccggaaacaaatctagcccgtttgcttatctcggaagcagatgaatacagcgagctggatggaaaagccttggtagcacaaaaggtaaaattactatctgtcatgggaggactctatggtaatgaattcgacttccctgaatggaacattgttaatgatctgaatgcagcccaaattactttcaaagaatggcctactccaattattgccagcggatgggaactaggaaacaaaattcgatatcctcatcaaagtatattaaatgattttgccggcagttataaacatcctctgtgcgtatcatataaaatatatcaggaaatgccatatgacagagaaacatgggatttgacatccgtgctacaagccatagaaccggggaataattatttcaatttatccgagaagggaacaatcaccatagacagtatcggacaaagtattttttctccttctgaaagcggtaaacaccaatatctcactattcaaggggaagaaaatattcgggcaacccgcaacgcacttataagacaagtgacaggaaaagagaattgaaatcttaaaaaaaaatcattatgtatatagtcaatagttacaccttagctattatcttctgctttatcacaatgatatgctggggatcgtggggaaatacccaaaaactggccagtaagaattggcgttatgaactttattattgggactacaccatcggcatcttgctgttcgccttacttctggtattcacactaggaagtttcggagattcgggaagaggttttctggaagacatccaacaagtggaagcggcatatattgccagtgcacttatcggaggagttattttcaatgcttccaatattcttctttccgcctctgtatccgttgccgggatggcggtagcttttccattaggagtaggactggcattggtcttgggagtattcattaattatttcagctcccccaaaggagatccgttctggctattcacaggagtcgtgctgattgttatcgccatcatttgcaacggtattgcagccggtaagaatcaaaaggcaggaaccaataatagcaaaaagggaattattcttgcagctattgccggtatactgatgtcattcttttaccggtttgtcgccgctgccatggatttgaacaattttgaatcaccgacagcaggaatggcaactccttatactgcattcttcatctttgccatcggaatcttcctaagcaacttcctcttcaatacacttgtgatgaagcgtccgttcgtcggtttacccgtcacttacaaggaatactttgccggaaaagcaagtacacacatggtcggaattctcggaggatgcatctggggattaggtacggcattaagctacattgccgcaggaaaagcgggagcagccatttcttatgcacttggacaaggagcaccgatgattgctgccctttggggtgttttcatctggaaagaatttaccggtagctccaaagcgacaaacagacttttgggagtcatgtttatattattcattttgggcctgacattcattgtcatctcaggaggaagctaaaataaaaaagaggtaaaggaactattaggtattatcaatataaaaagaatcaccccaaaagttagaaactaaacttttggggtgaaattcaattctatgattcaaactatcatatacattattcagaccgttatatccagcaaagtttctccctttgcatccaacaccctgactctgagttcttctttcctcttctcaagaatcatcacggtagcaccctccatcttatatcctccacctataacaaccggaaaatgattccccaattcacctttcgggtgataagcatacttatgagtatgagcattcagacagatatcaaaaggagctttttccagcagcttagtccatagttcagtacaaagattctttccatcattaccataaagagggatatggtgcagaaggatacgtttcttcgctttcttaaattctttggcagccagttctttcttcagaaaaccgacctgttcattacgtaactgggtgaaatcattcaaatcataatagacccaatgatcgtctgttttgtcttctccacagtccagcatgacaatacgggtatctccccagttgaaagagccataagtcttgtcacctacataatcaaaatggtcacgcaaaccgatagaataggcgttccggatttcgtgattcccccgcataaagaaagtcgggatacaatctccgttcattccttcggtcagttcactgataaaggcagttgcctgatcatgacttgccgggtcgtctacacaatcaccgttgaaaacaacaaaatcatagtcaatatcctgaatttgcctgcacaaagcccggaaggtatgggtatgctgatgcaggtcattgaacacaacagcagtaaaagaatccgtaccggttacaggcagagtaaattcactgaaagcagaacgggcagtatttccgaaaactttcttatatgcctgataaagcaacatttcttgtgaacagacacgataataatacttttgaccgggctgcaaatcatccagccgtattttatgtaacttgttattgcagactacctgtccgtcaacaatagtacgcgcacgctttaattgagtcgtatccgtaccgtattctacccaacaataagcaggaacagtggtttcccacatcacggtcattccatttccaaccggattctgcaaatagggtttagtacggaatatcttatccgccttttcggcagtgcgcagttccacaacaatagggcgatgatcggatgctacaggttcattcaccacttccgaagagacgacggcaaatcctttatcattctgcttaaaagccgccacgtaatcaatagtctcctttggggcgggagcaggaaaagtgtgttgtttgggattagagagtatccgaaattctttctgcaactctttgataaaatccgattccggctccgcattcatgtctcctgccaaaaaaagaggctttttataggaagcagcaaaagttttcagaatctccaatgacttcatccggtcttcttccgtaagggataaatgagtgcaacagtaaatataatcttcaaactccgctaagatcaatgcacgggcttcttccctgccgggcaaagctatagcctgcaagtgaagcggagctttctttgacagcagaccgattccgtattttccgccatcataatctatagctggagcaaagcaggcatacatctgtgtccgctcggctatctcacctaatacatatttctgattactccgattggtcacgctgtctacttcctgcacagctaccacatcgggagaagcgttattaatcacatttgcaatacgctggaagtcacagacaccatccatgcctgttgcatttttgatgttataggtcatcagtctcaacgtatgctgagcctgcaccggaacaattaacaagatcgcggaaatcagtaagaatatctttttcatgtttctcattgggggttaaatattagaatcacaaaggtaagaaaaaaataaaagccacaagagactttttacaatctctgtggccattacttatacatgaggggaaatgtataaataatctattttatcagatgatgccccgcacgcggtcatcaaaggcagaaagggcagctttcgcaccttcgcccatagaaataataatctgtttgtaaggtacggtcgatacgtctccggctgcatagattcccgtcacattggtacggcaatgcgcatcgataacgatttcacccggtcggtttgtttccacaatatcacggaaaacgctgctattggcggaaagtccgatctgcacgaatactccgtccagttctaccaaacgttcttcttccgtcttacggtctttgatgcgcaaggctgtcagtttatcgccattaccgattacttctgtcgtttgcgaactcacgaatacttccacattcggcagagatttaagtctttcctgaaggacattatccgctttcagttcatccataaattcaaagacggtgactttagaacagatacctgccaagtcaatggctgcctcgatgccggagtttccaccgcccactaccgcaacctgctttcctttatagaaaggaccgtcgcaatgaggacagaaagcgactccacgcccgatataatcgttctcgccgggaacattcagttttcgccagcttgcacctgtagcgataatcaatgcaggagcaatgaatttctctcctacgaaagtagttaccagtttatcttttccggcaagttctaccttttctatcttacgctgttccaacaaatcaacaggataacgcagaagatgcgttttcagattatcggcaagttcgcttcctgttgtttcgggaaccgaaatcagattctcaatgcctaccgtctctttcacctgtccgccgacacgctcggcaacaatcgccacgcgcaagcctttacgggcagaatagatggctgctgatactccggcaggaccgccaccggctacgataacatcgtattccttcacttccgtctccaccttggtttcatcaataccgtattgcgcttccagtttagcaagcaattcgccaaattcgccacgacctacatgaagcagtttcccatcggcaaatacagaaggcacgccttgtatcttcaaggcatccacttcatcctgatacagtgcaccgtcaaccatttcatgagtaatggaaggattcagtgtggtcattgcattcaatgcctgaactacatccggacagttggtgcaagtcagtgagacataggtcactaagtgtatcggacccttcaaggctttcacacggttgcagacagcctcatccggaaaattctttcccttaccgtccagattcaggatggcgagtaataaagaagtaaactcatgtccgttggggatagcacggaaagtaattcctgtaggtttaccattctttcctatcgtaaatttaagtccgcttccttcatttaccatacaagtgatgtgatcggaacattcggctacatcgctcagcaattccagcaattcggcacggctttcatgactggctgatacggatatatcaaaggtaaagtcagcctccaatccggcaaaaatacccttcagttgttcttttaatgcaggttctaacatctctctttctcctttcattcttttaaaagaagggccggcagcgtctccgttaccggcccttcacacacattatcaagatctatcaaatcttaccgacaaggtcaatgcttggcttcagagtagattcgcccttcttccatttagccgggcaaacttctccgtcgtgagtagccacaaactgtgcggcttctactttgcgaagcaattcgctggcgtcacgaccaatattgttatcattcagttccaccactttaatctttccttccgggtttactacgaatgtaccgcggtaagccataccttcttcttcgatatatacacccagtgcacggctcaaagcgcctgtcgggtctgccagcatcgggtatttgatcttacggatactttcggaagcatcatgccaggctttgtgtacgaaatgcgagtcagtacttaccgagtagatttccacacccatttcctggaactgagcatatttgtcagccatgtctaccaattctgtcggacatacaaacgtaaagtcggcagggtagaagaaaaggattgcccatttacctttcaggtcgttgttggttactgtcttgaaagctccgttttgaaaagcctgaacactgaattcaggaagttgagaatttaaaattggttccatactctttattgcttttattgttattaattgatttgacttataacatcagaaacatcgttttgttttttgtttctgatgcaaagataaaggcgaaaaccccgcctttgcaaaaaaagtccaatcgaataattctatcggataatagatgaaaccaatatgcctgccagtgaagctgccttcttctacttctttgttttcagtaaacgcatactgagaaagcctgccaaaaagataacaatggttccgaagacaatagtcaggttagcatgaaacgggcttgcatattcgctcacaaaaccatctttaaagaagataggagataagctcatccagacgacaacgataatgccacagatcactcccaaaacggtgtcaacattccgcgccttctttgaaatataccccagcaggaagagtcccagcataccaccgctgaagatggaggacaaagcccaccaggcatccagcgcactctctacgttcagaaatgccagcgctacgaaaataccgattattccgatcagtacattcgaaacatacaaggctctcaccgattgtttttctgtcggtctcttatttatataacgggcataatagtccgtcagaatgatagtagccgaacttgtaatgcttgtagccaccgtactcattcccgccgcaaaaatggaggcaatcaataatccggtaagtccggtcggaagcgcatgtacaataaaatagggaaagaccgcgtccccctcgacccctgccggaagcagttccggaaacgtcttgtaatatgcatacaatgccgtacctatcataaagaacactgcagaaaccggaataaacaaataacctccgaagagagcggagaacttagcctgtttatcactctttgccgtcagataacgctgtacgtagttctgatcgataccataattctgtagattgataaatataccgtaaataaggcatacccagaaagtagactcggtcagactgctgccgaaacttcccaaactgaatttctggtcagtaatggctatctgaaatacctgcgcaggcccttcgggcattttaaacatcagcacacaaaggcaggctatcgcaccaccaatcagaataaatccctgaatcgcctccgtccatatcacagctttcagaccacccagcattgaataggcaataatggcaacgctggttactgcgataatcatcttaatatcccatcccagcagggcattcataggcaatgcgagcagatacagaatagaccccatccgggcaacctgcgtcaaaagataacacgatgacgcatatacacgcgcccagggaccaaagcgttcttccagaaaactgtaagccgatacgcttccgatagaacgataaaagggtacaaagtatttagcagcaaaatacgaggctatcggaatggacaagctgaatacaaaagcattccaatcggacatataggccttgcccggataagccagataactgatactacttacatacgttgcgaaaatagacattcccacaacccaacccggaagggaacgtcctgccgaagtaaattcctccgacgaacgtttcttgttgaagaaagagcagccgaagacaacaactccccccgtgaagaataaaaagataataatgtcgagaatagacatagccgttcattttttcttgattaattacctgagcactacatcaactcccaaattttgaagtgccttccatatttttcctctttcccgttgttcgaacttatggaaaggcgcagccacataatcgctgcatattccaagtagactgagagcacatttcagacctttcaggtaactggacccatgttgccctaccgtatatatcgtagcactgatttgcattactttttcctgcaaacgtctcacttcttccatatctgcattcttcgcagcgttgtataagctcacatacaattcggggaacatattcgcaccaccgtttacgccgccatgagcccccagcagtacggattctgccataatttcttccggtcccaccagcatcgagaaatccggattatctttcatggcatacatcaccgactggaaataaaccgtatttgccgaactgtctttaaaaccaatcacgccgggattctccgctattcgccgaatcgtagccggtgcaaagcttacctttgtatgagtcggcatattatacagaaacaagggtaacggcaactgaggcagcagatgctcataaaactcgatcagttcgggctgacctgtcgcaaagtagtagggaggagcggaaacgacggcatcggctccatgatctgccgcaaggcaggcaaggttcacactctccacaatcgaagtatcggaaatacataccaataccggcaaccgtcctttcgctatgcggcaggtatttttaatcatttccaccctcaatttataactgaggctctgtgattcaccggtagttcccaacacaaaaagagcatgtactccccctgctatcagatgttcgatcaatctttgcaaaccttccacatccaacacatcatcgtccagcaagggagttaccaacggaggaataattcctgataaaggaatattcattttgttattcatagtctgattcttttaatttgtatatgattgttattaatgatactaataagacggggtatttagcattttgtaatcacattattccatatctgaagaaaagattttatatttttgtcggcaaacaatctattatataaaatcagttatgatgaaacatcctcttgcccaattcctgtactgtcccgaatgcggttctccgcacttcgaagtgaacaacgagaagtctaagaaatgcacagactgcggctttgtttattatttcaatccgtcttccgctaccgtggcactgattctgaatgaaaagaaggaactgctggtctgccgccgtgccaaagaaccggccaaagggacactcgaccttcccggaggatttatcgacatgaacgaaacaggagaagaaggagtaggcagggaagtatgggaagaaacaggattgaaggtagaaaaagcgacctatcagttctccctgccgaacatttatatctattccggctttcccgttcatacgctcgatatgttctttctctgtaccgtaaaagacatgagccatttctcggcaatggatgacgtggcagattctttcttcctgccattatcagagatacgtccggaagatttcgggctggattccattcggcggggacttgtacagtttctggctcaacacaattaactaaaaggggcactaaacttttgggtatcagaaaacgttttaaatgaggaaaatactaagattcgtattatctttgtaaccaccaataattataaaacaacaatcacatgaaattcaacatcagacttaattactctcatcaggaagataaaaaagagtccaaaaagaataagtatttcggattcaaaatggatgagagataatttacataaagatttaaatgattataaaataactttcaaagagttttcgttggaagatatagtcgtatttttgtcaaaacactagattatgaagaaaagaatatcacgaattatctgcaccttgttgtgttgtgcaccaattgccatctccgcacagacaagcgaaaagataacctctcctgtcaacctttataaagaagggaaagagcttttccaggaaaaaaattatgcagccgccatacctgcattgaaagcatttgtaaagcaaaagccaacagcaagtctccttcaggacgcagaatatatgttagtcagttcggcttatgaactgaaagacaaaaaccgcatcgagttactgcgcaagtacctcgaccgttatccggatactccctatgccaaccgaatctattcactgctggcttcctgctacttctacgaagggaaatatgatgaggccctggcactctttaattctacacggctcgatctactgggaaatgaggagcgcgacgaccgcacctaccaactggcaacctgctacatgaagactgataatctgaaagaagccgccatctggttcgaaacgttacgtgccagcagtcccaaatatgcaaaggactgcagttactatctcgcttatatccgctacactcagaagcgctatgatgaagcgttgaaagacttcctccctttgcaggacgacccgaagtacaaagaactcgttccttactacatagcagaaatctatgctatcaaaaagaactatgataaggcgcagatcgtagcacaaaactacctgtcggcctatccgaacaacgagcacgctgccgagatgtaccgcattctgggagacgcttactaccatttcggacaatatcaccaggcagtggaagcattcaccggctatctggacagagatcactctgctccccgccgggatgcactttatatgctgggactctcctattaccagacaaaagtctactccaaagcagccgaaatgctgggacaagtgacgaccgccaacgatgccctgacccagaatgcttacctgcacatgggactctcttacctgcaactggcagaaaaaaacaaggcacgtatggctttcgaacaggcagccgcctccaacgccaacctgcagattaaggaacaggccgcttacaactatgcactttgcctgcacgaaacatcctactccgctttcggtgaatcggttactgcttttgaaaaattcctcaatgaattcccgacttctccgtatgccgagaaagtaagcaactatctggtagaagtttatatgaatacccgcagctacgaagctgctttaaagtcaatcgaacggatcgccaagccgagtgcacagatcatggaagccaaacaaaagattctcttccaactgggtacacagtcatttgccaatgccaatttcgaacaggctctccaatatctgaaccagtccatcgccatcgggcagtacaaccgccaaacaaaggcggacgcttattactggtgcggagaatcttactaccgcctcaaccggatgatggaagccgcccgcgatttcaacgcttatctgcaactgaccacgcagcccaataatgaaatgtatgcgctcgccaactacaacctaggatacattgctttccatcgtaaggactatacacaggcaagcaattacttccaaaagtatatccaactggaaaaaggcgaaaacagaacagcgcttgcagatgcctacaaccgtatcggagactgtcatctgaatgtgcgcaactttgaagaagccaagcactactactcgcaagccgaacaaatgaatactccttccggcgattactcattctatcagctggcactggtatccggtttacagaaagactataccggtaagatcactcttctgaacagactggtcggcaaatatccttcttctccatacgcagtgaatgccatctatgagaaaggacgttcttatgtactgatggataacaacggtcaagctattacctctttcaaggaattgctggagaaatatcccgaaagccccgtcagccggaaagctgcggctgaaatcggtttgctgtattatcagaacggcaacttcgaccaggcaatcaatgcgtacaaacaagtgattgagaaatatccgggcagcgaagaagcccgcctggcaatgcgcgatatgaaatctatctatgtagatttgaaccgtatcgatgaatttgcggctttagccaatgcgatgccgggacacatccgctttgacgccagcgaacaggactcacttacgtatgcggctgccgaaaagatttatgcacgtggcagaacagaagaagccaagagcagccttaataaatatctgcaaactttcccagaaggagcatttagcctgaatgcacattattacctctgccagattggaaatgagcagaagaattatgatatggtgctcctccactccggaaaattgcttgaatatccgaataatccattcgcagaagaagcgctgatcatgcgtgcagaagtacagttcaaccagcaacagatggcagaagctctggcaagctacaagatgctgaaagaaaaagctaccaatgtagaacgccgccagcttgccgaaaccggtatcctgcgctgtgccttcctgctgagagacgacgtagaaacgattcacgcggctaccgatgtgctggctgaagccaagcttagtccggaactgaagaacgaagctctttattatcgcgcaaaagcttataagaatcagaaagcggacaagaaagcattggatgatttccgcgaactggccaaggatacccgtaattcttatggtgccgaagctaaatatcaggttgcccagtctctttatgacgcaaaagaatatacggcggcagaaaaagaactgctcaactacatcgaacagagtacgccacacgcttattggctggcacgcagctttgtcctcctgtcggacgtatatgtcgctatgggtaaagacctcgacgcacgccagtatctgctgagcctgcaacagaattaccaaggcaatgacgatatcgagagcatgattgaagacagactaaagaaactaaacaagtaaagattgaaaagtatgaaacgaactctttatatagcaggaggctttacactggcatttctgatgccgttcaaccttcaggcacagaatactcagccgaaagatacgaccatgaaccgcacggtcgtcgtagaacaggaatataatcccgacattctggatgcttccaaagtgaatgtgctgcccaaagtggaagaacctaccgtcagcaaaaaggaagtggaatatgccactactttcttcccggctacctctattcctgccgacctaatgcgtccctatgtaggaacggaagtgcagcccggcagcaagcccggatatatacgcgccggatatggaaactacggtaatctggatctccttgccaattacctgttccgtctgtcggacagggacaagttgaacgtccgctttcagatggacggaatggatggcaaactgactatgccggaagcagacacgaaatggaacgcttattattaccgtacccgtgcgaatatcgattatatccaccagttcaacaaggtagatttcaacatcgccgctaatttcggactcagcaatttcaacctttctccggttcagcccggcaagcagaagtttacttcaggagacttccatctgggagtaaaatcgacagatgaaaattatcccatacagttcgaagcggaaaccaatctgatgatgtacaaccgtcagaacaataacactttctttttcaatgacaaagtcggagaaacacaagtgcataccaaaggattgatcagcggcgctatcagcgacgaacagagcatcaacatcggattggacatgcgtaatctcatctacaataaagacctgaaacttgctgacgacctccaggtatatgagaaccgtaccgctctggcactgaatccgcattataaacttagcagcgacagctggaatctgcgtgcaggagccaatgtagatctctcattcggcagcggtaaatcattccgcgtgtctccggatgtaacagcacagtatatcttctccgacagctacgtactctatgcgcaagctaccggaggcaagctggtcaacgatttccgcagactggaaacgatctgtccttatgccttgccggcagcccctattcttgatacatacgaacagctgaatgcagcgataggatttaaagcgagtccttatcccggattatggatcaatctgtatggcggttatcaggatttgaaagacgatttctttgaggtacaggaagaaacatttgtcaactatgatccctcacttgccggtgatgctcag

SEQ ID NO: 4754 - DNA, 16939 bp, Unknown
  gut microbiota DNA sequence
aatatctgaatctggaattcagcaataccaacaacttctacgccggtatgaagatcagctatgaatacaaagacctcattgcattgtccgctgctggaacttaccgtaactgggatgcgaaagaaaaatacagcctgtatatgaaacccgcctgcgaaattaatttcagcgcagacttccgcccgatcacaggactgaatatcaatctcggttacgattatatcggacgcacaaaggtagaaggcattaaagccgcagcagtcagcgacctgcatgccggagccagctataatgtgttcaaaggagtatccgtgtatgcccggattaataatatcctcaataagaaataccagtattatctgggctatcctacagaaggtcttaacttcctgggaggattaagcttcagcttctagacaagacatattctccaaagagaagaaccaatcagatgcccatcctgttattgcctatgtgcaacataacaggatgggcttttttattgttccttacaaagcctccttttccatcccgtctataattttgtatcaaggtctacccatttgttacagatagtgtttctagctatttgtgcacctaatttggtgaatattgcacgtccatttttcacatcacccctaattttgcatcatcattaaaagataaatgaagttaaccttattgcacataagcaaaggatatatttagaaactgaagagagaataaagagaataaaagtcacccccaacccggttgacctaactataaactaaatatattattaacctatcaaattaaacagtatgagaaacgcgctcaatttaagattctgctttcttgttacgtttcttttattcataccgttgatgtatgccttgcccccggaaggtatcacaattaagggtagagtaacggatgaaacactcaaagaaggcgttcccggagctaatgtgactgtgaaaggcacgagcattgggacaatcacagactttgacggtaactttacgatcgtcgccccaagcaaaaaatccgtattgaacatttcctttatcgggtatgtaactcaggaaatcgtggtcggagacagaacaatcatcaatgtttccttaaaagaagatgcacagaacctcggtgaagtggaagttgtagctatcgcatacggtaatcaggacaagcgcatgcttaccagtgccgtctcctccattgacaacaaagagctgatcaaatctccggcaacaagtatcacgaacctcctcgcaggagcactgccgggtgtatcttccgtacagactaccggacagcctggtaaagatgctgctgccatctacgtacgtggtgtcggttcattaaatgattcacaatccaagcccctggttttagtagacggaatagaacgtgagttttcacaaatcgacccgaacgaaatcgaaagtatttcagtattgaaagacgcctcttccaccgctgtattcggagtaagaggtgctaatggcgttgtattgatcaccacccgaagaggtaaagcaggcaaaacgcagatttccgccagcaccaaactgggtctgcaacaacccatctcactggtagagcagaccggaagttacgagttcgcacgcttctggaatatgaagcaggagatggaccacgttacgaatcctaagttatacttcactccggaacaggtagaagcctatcgcaccggctcagaccccatcatgtatcccagtatggactggaagaagtatatttttaataatatctatcttcaaagccagaacaacctaaatatctccggcggtagcgataatgtacgatacttcatctcagtaggttatacttatcagaacggacttctgaaagaacttcccggacaaatgtacgacaataactatcgttacaaccgctataactaccgcgccaatatcgatgccaatctgaccaagaccacttcgatgaaactcggtgtcggtggtgttttaggtaagatacaggaaccgcgcagcgtcgtttcgggtacaggagaagaccaaaacccctgggtaatcgcacagatctggtcacatccgtttgccggaccgggatttatcaacggagtacgtacactgattcctaaagatatggttccgctgggagaagtgatgcgtgacggtatgttcgtattctacggacaaggttacaatcaaacgtatgacacgacattgaatctggatttggacatcacacagaaactggactttatcactccgggactgagcgtttccgtgaaaggtgcttacgacaataaattcaaactggaaaaagtacgtacgggaggcgccatcgaagcgcagactgtgtactacaaatcatactttgacaccaacggtacgatgtcacagaccgatcccgactacgataaatcacttatctatgtacccagcggcagcgatactccgctcacttactcggaaagcagcggacgcggacagaactggtatctggaaggacgtatcaactatgaccgtacattcggcgaccacagaatatccggtctgttcctttacaatcagtcgcgtaactattatccggacagctacacttatctgccccgtaactacgtaggattggtaggacgtgctacttacgcctatcaaagtaaatatctgctcgacgtaaacgtcggctacaacggttcggagaactttgctccgggcagcacacgtttcggtgtattcccttccttctctgccggatggatcgcaactgccgagaagtttatggaaaaccagaaaatcgtagactacctaaaactcagagcatcctggggacgtgtaggtaacgacaagggagtagactcacgctttatgtacatgcctgccgtatggggatcatcgggcagttacagcttcggtgtggacaatccgatttcccaatcggcagcagccatctcacgtatgggtaacccggcagtaacctgggaaacagccgacaagcagaactacggtattgatcttaagttcttcaacagccgcctgtccgctaccttcgactactttatcgaacaccgcacaggtattctgatctctccggaatcgaccccaagcatcatcgcaactgcactgcctaacctgaacattggtaaggtagacaaccacggttacgaagtttctctcggctggcgcgataagatcggaaaggatttcacctataatgtggatgccaacgtctctttcgcacgcaacaaaatcctctatatggacgaagtgcccaagcaattctcttatatgaaccagaccggtggctctaccggacgccagaccggagtatacaactacatccgtctctatcagtacagcgacttcatcaccggagccgacggcgaactgaccttaaagccggaactgcctcagccttatcagaaggtatatccgggtgacgccatgtacgccgacctcaacggagaccacatcgtggacggtaatgacaagagcgtagcaggttatgctacccgtccggaatacgttttcggtatgaacatgggattcgactggaaaggattcaacttcaccatgcaatgggtgggttccaagaacgttaacagaatgtatgacatcgaataccgtatcccttatacgaatgccggaaagcgtggtttgctgacctacttctacgacggttgctggactccggaaaaccaactgggagctacttatccgcgtccgtcggaagaatcggaaagctggaactccgaaccctctaccctctggttggtggatgcttcctatctccgcttgaagagcctgagcttcggttataccatcaccggaaagaaattcctgaagaaactgggcctcagctcactcggattaaacttcagcggctacaacctgctgaccttctcaccgcttaaatatcttgatccggaaagtgatcctaaccgattcggagattatccgctgatcaaagtatatagcttcggtttaaatcttaacttctaaaaaacgactgtatgaatagaataataaaaggactcggaatagcattgggttgcgtactgatagcctcctcctgttctgaaatcagcttcggggataaatttctgggcgaccagcctgagagttccggagcgactaccgaagaaatgttctcttcgaaaataaatgccgaaaaggtgctgaccaaagcatataccggattaccttatgggctaccgaccggctctgactacaaattgggtgtgaacatacttgaatcaatcacagacttatgttatagtttccgtgataatatcagtgacggtcctgtcaagctctattacaacggagcactcagcgccaacaatgttcccaaaaattccgcttaccgttatggaagcaaatccgactggactacaatccgttatgcctggttgtacattgagaacgtagaaaaagtgcccgacatgacagccagcgagaaaagcgagcggatcgcggaagccaaagttttgatctccctctgctatttcgaaatgctgagatatgtaggcggtgtgacatggctggaccactatgtagacgtaaacgagacaatgaatttcccccgtatcacttttgccgaaacggtagagaagatcgtaggattgctcaacgaagccatcaactccaatctggcctggaaagccgagaaagcagatgacggacgtatgaccctggcaggagcgatggcattaaagttcaaggtattgcaatgggcagccagtccgactttcaactcaaacactaaatggcatccggaagcagacgaatatacctgttacggaaattacagcgaccaacgatggaaagatgccgccgaagcaggcgcagcctttttcacagaattacaaaaacggcacgaatacgaactgattcaacctacggaagagacgcaccgggcaagacgtctggcctatcgtcaggcctactacaaccgcggcggaacagaaatattaatctctacccgtcaaggatatggctccgatgttcacagcagctttatcggccaacgttattacagcggccctacattgaactatgtagatatgtttccgtgggaagacggaactgattttccggcaaatttcgactggaagtcaccctccaagcaaccgttctttacaaaaggcgaaatggtgcccacccgcgacccacgtctgtatgaaaatgtagcttgtcccggagacacctactgcaacggaacaacagctcctgtttatatcaaccatgccgactacaaagacggtagcggattcctgatcatgaagtacatcttacaggaaaacaacgatcgcgaaggtccggtacaatggtcacacacccgtctggcggaaatcatgctgggatatgcggaagtactcaacgaagtcaacggacgccctaccgacgaggcttacaaaatggtaaacgatgtacgaaagagagtaggtctgccggaactttccaagacgatgaatcacgatcagttcctcgaagcagtactgagagaaagagcactcgaattaggatttgaagaagtacgctggttcgacctcgttcgcagagaccgtcagagcgacttcaagaagaagttgtacggactcagaagcagaggtaacgacctgaacaatccgactgagttcaccttcgagaagatcgaactgggagaccattactgggctaccaactgggataccaagtggtatctggctccgattcctcaggaggaaatcaacaagcaatatggaatgacccaaaacccgggctggtaaatgacacgttaactaatatcgtttgaacaatgaataaaataaattatatattaatcactctgctcctgggaggttcggtatccctgaatgcacagacatcgaaagctgcttcggaaatgcagctggcagatacactgagcatcggctaccagatgaacgtatcttcccggaccagcagttactctatcaacggagtcaatgcttccgcattcgaaaaatccccgtacatagatatcagcaaagctttgtatggaaaagtggcaggtctgaatgtatatcagggtacaggctcgtcagccgataacgtatccaccctctctatacacggaaatgccccgttagtattaattgatggtttcccacgtgatatcagtgacatcacttcgatggaaatcgaatcatgctacgttctgaaagatgcggcagccgctgctctctacggtatgcgtggtgcgaatggagtagtactgatcacgactaaacgcggaataagcaatggtctgaaggtaaatgtggactataatttcggtgtcaatacccaattccgttctccggacttcgcagatgcctatacgtatgcgaacgctcttaacaccgcattaagcggagacggtctgcctgcacgctacaatgcgcaggaactggatgctttccggacaggaatctatccgtatgattatccgaatgtagactggtggaatgaaacgctgaacaacacaggattgacccacaacctgaaaatgtctttcagcggaggtagtgacaaattccgtttttacacggtagttgactattaccgggatcgctccatgttgaagaaaaacacggaagatacacgtttcgacactacacctacagacacacgtctgaccgtacgtaccaatctggacgtaaaagtgacggaaagcacattgctgaaagccggcattgtaggcagactgaaagaattcagaggtacccgctatggacgcagcgctattttcaacaaaatctatggcattccatccgctgcattccccattcgttatgagaatggcatttatggaggtagttctgtgtacggaaccggtaatccggtagctctgttgaaagactacggacacatccgtaacgtatacggaacactactcgccgacctaagcatccgtcaggatttaagtgcgttgaccaaagggctggcagccgaagcatccgtctctttcgataatatcggaggaatgaatgaaaccaccaataaagagtatcgttacatgaacagcaatgcaagtatcaccagcgatggtacactggtgacaactcctgccatttatggtacagactccgaaacactgggacatacacagcctttcgaaaggctgatgctacgcagcgatttccaggcaaaggtggattataaccgcacttttggcaaacatcaggtgggaggagcattgatttatgatatgcagtctgttgtcaaaaacggcagaaacaactctcagaagaatcagtctgtgctggtgaacgccacatatacttacgacaaccgttacagcctcaatgccgtatttaaccgttcgggatcagcttacctgcccgacggagacaaatactcgaactatcctgccgtttccgctgcatggatcgtttccaacgaagcatttatggaaaaggtgacaccgatcaatctctttaagattcgcgcctcttacggtctgtccggatgggacggcaatctgagccacgaactatggcgtcagtcttatggcagcggcggtgccggttataacttcggagtgaatgccggaggacagtccggtggcagtgaaggcgatctgccggttatcggcctggtagcggaaaaatcacagaaagcgactttcggatttgatctcgctgcttttgataatcgtttgaatgcaacagtagaaggtttctacgaaaaacgttcggatatacttgtgtcaggtgccaattctacttccggtattatcggtatcacagtaggtcaggtgaacgaaggaatctataaatacaaaggagtggatgcttctttgagttggaatgataagatcggtgatttccattatggtattggtgctagcatgtcatatctgaatacagaggtagtcaatgtaaaccaggcatatcaggaatacgactacctgtataccaagggcaaccgtatcggacagatgtacggcctggaagctatcggcttcttcaacagccagcaggaaatcaacaacagtccgcaacaaaccttctcggacgtagctcccggtgacgtgaaatacaaagatcagaacggtgacaaccgcatcgacgagaaagacattgtgaaaatgttcggttcatctgttccacgcttctatttcggattcaatctgaacttctcatacaagagactggagctttccgctgatttccagggaatgaccggagtcactgtttcattgctcaacagtccgctttatagtccacttgtaagcaatggcaacatttcaaatacattcctgaatgaagaaataagctggacaccggagaataagaccaatgcaaccatgccgagactgactactcaagaaaacttgaataactatcgcgccagctcactgtggtaccgtgacggttcattcctgaaactgcgtaacctattggtagcttatactttcccgaaatcgcagactcgctttgccgacctgaaagtattcgtacaaggcaccaatctgttctcattagacaatatccattttgccgatccggaacaacttggcatcgcttatccgtcgacaagaagttattgggcaggtatcaaacttaatttttaatgcaaagtaacaaatgaacattatgagaaccaaatacatactcttaaccattttgtcttcgttggtctttgcttcgtgcaactaccttgactttgatgaaacgaacaacctgaagacaaaagaagacatgtacaagtatttcggtacaagcaaatcaatgcttacccacgtatactcatacatgccacaaggctaccaactgtttgcgacctccggcggaattttcaccgaagacagatattccatgcgcgactgtgccagtgatgacggcgaattcggagcctatgcagataatatccagaataccaataacggtaactggtcgcctattaaaacttatgacgattcatggaccctgtatcgcggtatacgtgctgccaacagctttatagcagagattgcccaagtggacttcacacgctacgagcacgacggacaatatacaaactggatgaagcagctgaaatatttcccttacgaagccagagtgctgcgggcacactacttctttgaactggcacgccgctacggtgacatcgccatgccattggaagtactgactgaagaggaagccaatacaatcggcaagacaccattcagcgaagttatcagcttcattgtcagtgaatgcgacgacgctgccaataacttgccggacagctatgtaaacgaaccgggagcagaaatcggcagagtgaccaaaggctttgcaatggcagtaaagtcaaaagcactgctatatgctgccagtaagctacataatccttctatggataccgaattgtggaaaaagtctgccaaagcagcaatagatattatcaacacagggctttactctctcgacccccaggagagtgccaacaacctcgactcaaaagaagttgtactgatgaggatcaatggtgatgactcggacttcgaaatgtttaatctcccgcttcgcatgactgcgggaacacgcacttccagtcttatcccatacagcaattacccatcacaaaaccttgtggacgcattcgagacagtcaacggttacaaagtaaccctagaaaacacaggatgggtttgcgaagaccctgcatttgacccgcaatcaccttatgagaatcgtgacaaacgtttctaccgcgctattcttgccaacggaatgtcgtttaaagactacaccattgaaaccttcaaaggtggcgccgacgacggaatcgtatcacaaggcggttcaccgacaggatacttcctgcgcaagtacattcaggaagctactagctttgaaccgggtaaagaagctgtcagcaagcatcattgggtgatttaccgctatgcggaaacattactaacgtatgcggaatctatggtcaacgctttcaatgatgtcaattacacagatgagacttataagtattctgctctgtgggctatcaatgaagtgagaaagaatgccgatatgccgttgattccttccatgggaaaagatgaattcatggaacgcctgtacaatgaatggcgtgtagagtttgctttcgaagatcatcgtttctgggatgtacggagatggaagattgccgatactacccagcgggaactatacggagtaaagatcgagaagcaggcggacggtacgttcaacttctacaagaacctttacgaaacccgtaactggagagattgcatgtatctgtatccgatccctcaaagcgaactatacaagaatacaaacttaaatcctcaaaacacaggatggtaattaattgtctaatctaatatttaaaagatatatgaaaaagttatatagcaacacgttaatgcaactgattcttgcactgtgcacattcagttttgtagcatgccaggagttcgacatcgactcacagccggaaggtcctctcaatatccagatagatgctctggagtcttatactgctttggcaacttctccaagcaatgtagtgttcaacatcagctccaacactccctggacgattgaaagcgaccagcagtggtgcaagccgactccttcgatgagtgcagccagctcacttgtgtcggagattgtggtgacaatggaaaacaatacaggaaagaaagcacgtacagccaaactgactatcaaggcagaaggcgttgaaggcactaaggtagttactatcgagcaggcttcgaaagaagacttggtggtggttccttacgatgaactggtaccgacagaaggcggcagcatcacctttaccattgcttccaacaaagcttgggaaatcattccttccaccgctttcctttccaatatcgacaaaacatccggtacaggtaatgaagatgccatagcagaaaccgtaactgtgacactgcccgccaatgcaggtgccaagagagcaggcacgctgactgtaaaaacagagtttgaagaatacacctttaccattactcagaatggagtgatcattgaactggaagaagatcccgaaagtacaacaatcagcatgcccggaacaggcagtggtatggaaaagactgtactgattcgcgcaaacaaagaatggaaagttgaagttcctaagaaatatcagagttggctgaaagctgaggcactgagtgaaacagagttgaaagtaacgacaacaacgactaataatctgatggtaaaccgtgtcggccacatcattatgaagaccaaagaagtcatcgacggatttgacggcattacgttcgacatcagtcaaggtactgctttctggaaagaaggaggagcagataactatgttgtggatgaggaaaccggttacatgacactctatggcagtggaatagtcaccaactatttattcaaaaaaggacgtctcgcattcgatttcgaatctatcaatttaaccggagaagattggattgagtttaatatgtggcccaactcaggaaatacaaacttccatttgcatttctacgcaaataaagaaagtaacttcacttgtggaggttcaggcttaaactggactcagaaaacatttacctggacatcggaacaaacgaatgtagtgaagaagattgaattccttgttgtcaacaaagaagaaggttcgaacgcattagttcttaaactgattattgatggtgttgaggttgccgtattagataataacataaccgatccttatgcaaccgaaccgggagcacctgtatacttcaggatgcataccacaaataaagcttccaatttcaccgtgaagtctatcacatgggaaccagtagaataataaccgaaccctaaaattcaagagtatgagattaaatatcagaaaatcaataattacaggcatttctctcgctacattgctacctgcattctctttattgcagagttgcgatgacagtgaagcagagaaatgggtagacctgcgctatagagtagaagactcctatctggttgaagcgaaaaatccggaaccagtctccttccaggtcaagtcaactgacccgtgggaagtattcggaaaatatgattggtacaccatctcacccagtacaggtgaggcaggtgagacctacaccgtaactgttacctgcaaagaaaacactgaattggacgaccgtatagacacactcaacattaaaagtgactactggaccggaaaaagattcgttctgacccagaaaggtactgcttacctgaatgtagaaggcgtggatatgatcgaccaggaaggaaacagcgaaacattcagcgtactcagcaatcagaaatggactgctaaagtaacagacggtgatgtttggctctccatccaatccggagcatcgggcgaaatgaacggagaaattactgtcaccgcttcaccaaatacaggcgaacaacgtaccggtattgtaaccatctatgaccgacacgggaaaatagccagagaagtacaatgtatacaagacggtgtattgctgacaccagatacaccggaaaacggtaagtggtttgctatgtatgaacaggctcagcaactcaccatccacgtagaatcgaatgcagaatgggaagtatccaaagaaaacgaagcggatgatacctggtatcactttgaaaagacttcattcgacggttctgccgacatcgtgattaacgtagacgcacacgaaggctcttctgtccgtaccggaattatcgtactgagcaccaaagctgccgaaggcgctactccgcttatgaagacaatcaagatcaaacaagcgaatccacaaagacctgtggttactgaagtaaacagatccatcagcggtgcttactacggaccgggtggtttaatgccgggtcattacagcttctattgggaaccgcttggcgacgccagtctgactactttcttctcttggagcggaaaagcatttgacggaggagacgtagaacttcgcttccatattctgagcaaacggactcaattaagtacaagaccgtggaacggtgacgtatacaatgagaacagcggccgtgatgtagataccagcaagccaaacgtattatcattcgagatacgcgaagctatagatgccaatgatccaactcaatcatggatttactcggaatggattctcaacggtacagtcataggaaaagcaaccagcgacggtgtgatagacgctaacggtacaagtgatacttacaaagtaccattctcggataccaaagatggtggtaatttctcgatgacaatttccggcggcagtgccacactgactaaatgggaatacatcgctccactagtatggggagactaattctctaaagatagtgattgcctgaactccctcaatcaggcaatcgcttctaacaaactcaaaaatcaataaaaagaaaagagtatgatgaaaagaaaaatattacttatactgaacatggcaatcatcggattttccactgctgcctgttcggatgatgagaccaattacatcactccggaaaagaaatatccgctcaccgcttttgccgtagcagtaaataatgtgtcagcgaatacgacttcctactatcatgggaaaatagaccagacaacccacagagtggaaatcggtacgatcgaggatgccaataccatcaccggcgtagactatacgctaatgagcgacggagccaccatctcaccggacccggcaacatttgtacacaactggaaaaaagaacagacagtaaccgtcaccaccgaagacaatcaaacaacgacctatactatcgtactgaccaagtttgacgacaccatgaaggacgttctcttcatggacgagtttgacgtggacggcaatccggacccgaccaaatgggtactctgccagaaagcaggttccgactggaacgacgaaatgtccgaaagctatgaccaggcttacgtaaaagacggcagactgatactcaaagctgaaaaaataggcgacgaatacaaagccggaggtatcgagacacaaggcaagtttgacttcaccttcggacgggtagaagtaaaagccaaaatcaccagttaccccaacggtgcattccccgctatctggatgatgccgaagaaatatatctatgacggatggccgaattgcggagaaatcgatatcatggaacatgtgaaacaggaatccgcgatccatcatacgatacatactcactacacgtatgatttgaacatcaaagatccgtccaacaccgcacaagtaacttgcaattatcaggattggaacatctacgctttagaatggagcgaagacaaactgactttcttcgtcaatggacaggagactttctcttactcaaacctgaaactggagaatgaagcagaaatgaagcaatggccgttcacaaaagattcttcattctatctcatcctgaacatgggattaggaggagacagaccgggctcatgggcaggtcctatcgatgatgccaacttacctgccatcatggaaattgactgggtaaaaataaccaagttagataaataggttttaaggtaggagccaaggtttttaggaacttctaaagaaaagaggaggtttacatagtctcctcttttcgctttattgacaccaattccattgttaggaagtatttgatataatatgatgaaaattaagcctaaaaacaaagatggcagtaaccagaaaaaatatagtatccttacttatcggcttccttttattaggcttgctattccatccgatcaaagaaatacctgatgttcctcatcaatcattcttgtttacctgtacgttcctggcgacagtaataggtattgcagctttctatcccactaagccattcattcaacgactaactattatagacttgttagtcattctaatagcggtagggagcatatacttttatcctcctaactctaaccttctcggattagcccgttttgctctgatcatactatattggagcatacgtcagacaggaggattaaatggcactctcttatatactatcattctcataactattttagttctgtcaatgatcggttatatgcaaatactgcatatacttccctcccatcatcctcattttgatttaacaggtccttatggaaaccctacgatttatgccggaatattatgcttgttactgagtgctcctattgtggtattatctcatttcaagtcagataccatccataaatatacttatttagtaagttttcttacatgtattgtagctctgcccatattgtggcttactcactgtcgttctgcctggatagcagtattggctatcatcagctattccatttattgtcgcttttcaatctcttttcgatggggtatatcaaccttgattacaattgcgctactctcgtgcttgctatatcagttcaaaccggcctcagctgatggaagaatactgatctggaaagttaccgcacaaatgataaaagagaagccttttaccggctttggtcctcatggctttactgccaactatatgcattatcaaggtgaatatctgaaaaaagaaggaaacatatatgaaaaacagttagcagataataaccactatgtctacaacgaacctttacgctggacagtagaatatggagttgcaggattgctactttatattggaatattatattgcattttctcgtataagaaaagcgagatacaatctttatccgcccaggcgatatacatagccggacttgtctgtggattattttcttatcccgatcagactttcccgattctggctgttatgactatagcactggcagaaatgtccaacagacaaagagaatgtgtaattaaacaacttcctcacaaatatatatttctgaaagcagtcattttccttgtcatagcaggacagggagctctactaataaaaatatttcaatgccaccgggagttatatcaaatatcccatcgtacttccagccaatcaccggaagaaattataacgagcctttcacagctggaaacagcaatgaagaatgaaacaatattttggccatactattgtcatactctttacaaatcacagagagacagcatcttactggataagatcacttattgggaacaattatatccaagcacacatacctatattcttaaaggcgacgctctacaacgtacagacaaaataaaagaggctgaaacagcttattgggcagctcactttatggtaccctcccgacagaaagcacgatacaagttagctctcatgtactatcagcaaaagcgtatctctgaagcaaaccgacttgccaatgaagtgcttactgaaaaagtaaaagtatacggttttgaaacctatgaaatgcatagagaattacgaaggattttcgaagatcagctacaataattattcactagaatctaagaacatgaaaacaaaaaaaatcaaacgacctgtttgttaccttgtcggacttcttgcctttggtctgatgctgtattcctgcttacaggacgaaacagatctggactcacaggaaacgacagggaaagttattaaaggtaaaaaccgtgagctgagtatagatgtagcacggagttggtacgaggctcgtcagacacctgtagttactacccgctctgttgttacccatttcgagttaatgactaagctgcattggaagaaaggctacgaaaatcgaaaaggaaagtttgaagtagtggaagtccctctattgacaagaggaggtgcagttttaatggatcgtgaaactatggaaaaatataaggacacagagcgcggaaagatacgaaacatctcccgaatggtgatcatcaagaatctggaaacaggggaaatcatcaattttgtgatgcatatcgtaggtacttatgactatcttatgaaagcaaaacattttgaagacaatagttacctgtaccgggctcccgatcttagtggtag

SEQ ID NO: 4755 - DNA, 1530 bp, Unknown
  gut microbiota DNA sequence
cagaacatattttttgattgtggccatgtttttattcgccgtgttttggttgttctccaactcattcattaaatggaagaagtattcgtcaagccactcacttgttatatcatcaaaataaaggttaggattatactccttcaatttctttattactgataaattagtcttgtaggtagaatcttcaagttttagagactccttcttctgatagtccgtcacaaagtcaaagaaagtgttataatcagtcggacgatgatatgctttaagaaaagagtccctggtaagtttcctgtcacggaggcgatactttacaaaaacattgtttactctggctagaatagtttctataatcaagttcttatcttttgccaacttgtctcctgccccaacacatttcttcttatcgttccagtctttgatgtcaactgaaactttcgtagaaaagttcaccttttcacgattaacataaaaggataaccacacgactccattatccgggtcgctcccataggttcttagatatattttaatggttaccatgatctacaatggttccgtttgcagatgagaattgatctccggtctacacctgcacagtttgtcacacaaatgaagaggtagctaattaactgaatatcaataaatagcaaatgccggacacattgctgtatccggcattttggccacttcgaggttcctggcggattcgaaccgccgtacacggttttgcagaccgctgactaagccactcatccaaggaaccattttttctcgtttgcggttgcaaaggtagtacaaattttgaaactaccaactatccgcagcaatttttctttgtactttttttctttacaccgcactcttgacgtttcttctccatcatatcctttaaatcacagccacttacgcagctatcacaaggattctcactttctcgcgtacgacgaaaaaaaagataaattccatatattacacgggcaatgcagagtacaatcagtactccgactacccattcctgccaattattcatacaaacattcctccaatctgataaactgaaaatgccaccagccaggccagccctgtggtatagcaagctgcaaagagcgcccacttccaactgccggactcttgcttaatagccgccaatgccgcaatacaagggaagtaaatcagcacaaacagcatataacagaacgccactaaaggagttatcggaatccgttccgccaggctagcctcatcggcctccggatcatccacatacaaaacacccagcgtactaacgaccagctcttttgcccctactccggaaatcaaaccgatacccaacttccagtcaaagcccatcggctttatcaccggctctatagcccgtcctaactgaccgatataagaattttcctgttgttcagctactgtctcatacgcctcatggttcggataatatccgaggaaccagatgataatagaagcaatcataataatccctcccatttttttcagatactgcgctcccttctccca

SEQ ID NO: 4756 - DNA, 33429 bp, Unknown
  gut microbiota DNA sequence
taatatctactccctatgatctaccaagttttcagcgtttattaggtgatggttcagactacggtatatatcttgaatatgcagagcagccttcaccggatggattggcacaagcatttctgattggtgaaaaatttataggtagtgattctgtgtgtttagtgcttggcgataatatcttttatgggcagagttttacccggatgttaagagaagctgttcgtactgctgaagaagaaaataaggctacaatatttggatattgggtaagtgacccagagcgttatggagtggcggaatttgataaagaaggaaatgtgcttagtatagaagagaagcctgagattccaaaatcaaactatgcagtagttgggctttatttttatccgaataaagtagtcgaagtagcaaagaatataaagccttctgctcgtggagagttagaaataactacggtgaatcaagattttttacaagcacaagaactgaaggtacaattattagggcgtggctttgcttggctggatactggaactcatgactcgttgagtgaagcatctacttttatagaagtaatagagaagcgacaaggattgaaggtagcttgtttagaaggtattgctctcagacaaggttggattacttctgataaaatgtgtgagttggctcggccaatgttgaagaaccagtatgggcaatacttactgaaagtaattgaggaactgaaaatgaaataaaatgatggaagttataaagactaatatagaaggagtcgttattatcgaaccccgtatttttaaagacgatcgtggttatttctttgaatctttttctcaaagagaatttgaggaaaaggtttgtaaaacgacttttgttcaagataatgaaagtaagtctagctatggagtattgagaggcttacatttccagaaacctccttttgctcaaagtaaattagtgcgagttataaaaggagctgtgttagatgttgctgttgatataagaaaaggctctcctacatttgggcaatatgtatctgtagaattaacaggtgaaaatcatcgtcagttttttatacctcgtggatttgctcatggatttagtgttttaagtgaagaagtgattttccaatataaatgtgataacttctattctcctcaaagtgaaggagcaatagcatggaatgatccggatttgaatattgattggtgtattcctgctgaaaaagtggttctctcagagaaagacggtaagcatccaaggttaaaagattggcagaatgtgttttaggatattactccaattacctgcaattcagttcttagaattgaaataaacgacgattgggagcgtattcttgaacgaacgcaccgataaaaagaaaaaaacattgagaagattgtattgaatcttctcaatgtttgaatccaatcattaagaagattttttcaaacttcccaatgatttttgtaagctttcaaagtgacataatgacaaagaggacatatggcctcttttataaattcttatgatgcgttctttaaactactttgctgatttttaatttattgagtgccttttatggactgtttttatgtgattgccgaaatcgtattttacgcgagctagattgttgctttgttgatgaacgcttccggtagtttaccaataaagtgttggatattgtacggattatttaaaggatgaagtgtgggagatagcattaaggacaataataactggttatgctcataataacaggaaatcaggcagatatttgtacacgattttaggaaaacatggcctttgctttctgttttttaccttgctggtccgcttctttttcctcattgctatcttcaaaactatcatgtgcctttttgtccttttgtctttttgagagagaaggataaagcgaagtgtcgaatgcggatgagtgcatgcaactttttgtaaaccagattataacatgctatttatttctcggatagggaaaacggaatcctcaaaataggttgtaatatcgcgtaatatgcttttgggggaatatttttgtggcaggcttcgcaagcgaggagatttcattgatcaacagttaataggtttaagaaaatgtgctacaaaaaaactagctggtttcttttttgctttctattcttgatagaagaggtgattttttgacataaaagctttctttatttaatttattttatatctttgctagcatatcaagattacaatcaactatttattcacataaacttaataaaattatgttcaaagctcctttttcttttgacggtcgtattcgtagaatcgaatatttcctgtctggtattatcggtggtatcgtttttggtgttgcctattctctcggtttagctactttgtttcttggtgcggctgccggttccgcgggtggttccctgtttggtatcttgattggtatcgtagcgggaatagcttctatatggttctctttggcgcagggcgtgaagcggttgcatgacttgaacaagtccggttggttgatactcatttgctgtgttcctatcatcgggtgggtattcagtctttacatgttgtttgccgatggtacggtaggtcctaatcagtatggtgaagatccgaagaaccgtatgccatatcagccgcagccaacttctgtaaatgtaacagtgaatgtgtcgagagaaactcctgctgaagcacctgccgaagaagaaaaaacagaaaaagccgaatagtctttaataagcagaaatatggttgcctcttgcaaaattcgttttgcgagaggcatttttttactacctttgaggattggtaaacagaaaaaaagaagataaatatgaaaaaagtaatttgcagtgaaaaagcaccgggagctatcggtccttatagtcaggcgatagaagccaatggaatggtattcgtatcgggacagttgcctatcgatgcggctaccggaaagatggcggaaggaattgaagaacaggcacgccagtcgttggagaatataaaacacatcctggaagaaacagggctgacaatgggaaacattgtaaaaacgactgtattccttcaggatatgtctttctttgccggaatgaacggcgtatatgctacgtattttgacggagcttttccggcacgttcggctgtggccgtaaaggctttgccgaaggatgcgttagtggagattgagtgtatcgcggttcgctaacaaatcggcgacaataaaactgctgcctcccacgaagatgaaatctttaggggggcagttttcttttgctgcccgcacggcatccactacggtagggtaggaggtgcctttcagtcccgcttccaaagccattttcatcagctcatcttccggcattgcacgtttcacgctcgctttggtgaaatagtaggtagcgtctttcggcaacagttccagaacactgctgatatccttgtcgctgaccatgccgaatacaatatgcaattcctgatgtaacttttcgtgtatatacttcaattgcttgcgaatacttttaaagccatcagcgttgtgacctgtgtcgcagatgaggtcaggatagctttggagtttctgccagcgtcccatcagaccggtcatctcgcatacattagagaatccggtatggtaatctttattacagatttcatatcccaggttctttaaaatatccagggctgccaggattgtgagacaattttctgtttgacagagaccgctcagttcgtagtataatcccgtcataaaactggaattatgaatggatattgcgtcttttcttttatccatgattctgtctatcgcacgtatggcgtcagccgggttgataagagagacaaattgcatcattttcattggaagcgtctgtatctgctgaagttttatttcctcctccaataattcctgcaaatcggctctggactctttcaggttatcatatgacaaatattgcacatgggtgaaactctttaattcttccgagaaggtgatgaaggtattcattgccttggctttcatcgtaaatactcttttcactgctccggatacttttcccactactaccggaacatcttctttgataattcctgccttttctttggctattttagtcagtgtgtggcccagatattgcatatggtcgaaaccgatattggtaataacacacagatcgggggtgatgatattggtacagtccagacgtccgcccatgcctacctcgatcactgccacatctaccttctgatcggcaaaataacggaatgccattgccgtggtaagttcgaagaaagaagggtgcagaggttcgaagaaggaacggtggtcttctacaaagttgaccacatactcttcgggaatcatttcaccgttgatacggatacgctcgcggaaatcgatcagatgcggggaagtgaataacccgactttatagcccgcggcttgtagcacggcagcgatcgtatgcgaacaggaaccttttccatttgtcccggcgatatgtatcgttctgaattcttgatgcggatgacctaaatgttcgtccaatttgtgtgttgtctctaaacctggcttatatgctttaccacctatttgctgaaacatcggtgcactttcatataagtactttaaagtgttctgataatccatgttttataatatttaactccgggcaatctttattgctcgcaaaattgtttatctttagaaccatcattccaactgtaaacggaggattgatgaatgagactgcaaatatcaacattaaaatctaagaaatcatgggaactaagaaaaattttgtaattgacacaaatgttattcttcacgactataattgtttgaagaattttcaggaaaatgatatttatctcccccttgtcgtactggaagaactggacaagttcaagaaaggaaacgagcagattaatttcaatgcccgtgagtttgtccgggaactggatttgctgacaagtgacgaacttttctctaaaggagtgagtctgggagaaggattgggacgcttgttcattgtccccggcaatgtggatgctcccaaagttcatgaatcttttccggtgaagaaacccgatcatctgatattggcagccgttgaatatctggcgggtaaatatccgaagactccggctatcttagtgaccaaggatgtgaatctgcgtatgaaggcacgttccatcggtattaccagcgaagactatatcacagataaagtatccaatgtcgatatattcgagaaatccaatgagatctttgaaaacgtggatccggcattaatcgaccgtatctattcctccaaagaaggcatcgacctgagtgaatttgactttaaagacgtcattcatcctaacgaatgcttcgttctgaaaagtgaccggaacagtgtactggcacgatacaatccttttacccattccatttgccgcgtcacgaagggacgcaactatggtattgaacctcgtaatgccgaacagagttttgctttcgagatactgaacgatccgaacgtcaaactggtggcattgacaggaaaggcaggaacgggtaagacattgctggctttagcggcagctttaggcaagttgactgattataagcaagtattgctggcacgtccggtggtggcgttgtccaacaaggatatcggtttccttccgggagacgcacaggaaaaagttgctccatatatgcaaccgctgtttgacaacctgaatgtgatcaaacgtcagtttgccgctaactcgaccgaagtgaaacgtatcgaagatatgcagaagagcgagcaactggtgattgaagcgctggcatttatccgcggacgtagtttgagtgaaatgtactgtatcattgacgaagcgcagaacctgaccccgaatgaaataaaaacgatcattacccgtgcaggcgaaggtacgaagatggtgtttacgggagatattcagcagattgaccagccgtatctggatagccagtccaatggtcttgtatatatgatcgaccgtatgaaagaccagaatatctttgcacatgtcaatctggtgaaaggcgaacgcagtcagttgagtgagttggccagtaatctgttataaataataaagaactaaaaaaaagaagaatgaagaattaccggtagtataaatgcgccggcggattcttcattcttcttttttattctttgtttctagtccttcattcttaattttctttcttaccgaaatattttaggaattgcgtacgttcgaacgtattgatgccttgaacgtctttaatattcagttttcctttgaactgagcaatactttcgaaacctttccgttccatccatgcagataagaagcgggtggattctccgatgaatgcgttcgtgttctgatagacagcgctgcaaacttctacggcagtagctccggcaaggattgcttttactactgcttccggactggaaacaccaccggaggctgcataatcgattttgtctaccactgaggatgcgattccaatccaacggagaggagtggcaagatcggtggaagtgctgaatactgcaccggatatttgttccatattctcgatattgatatccggctggtagaaacggttgaagagaaccactgcagctgctccgttagcgtacagctgatcgatcagagctacaggatttgtcaggttgtcccccagtttcataatcaccggaatgcttactgtccgtttgatatgacgcaggatgtcgatatgacgctgctcaaatgaaccgtacgtatattgtacatccgattgcaatgccagaatattgatttccagtgcatcggcaccggcttcctgtatctgtttggcaaagtctatccattccgcatccgaatagcagttgatgctggctatgatggggatgttacactcttttttgctttccttgattaaggtgagatattcagctaatttatgttcacggatatattcttccagataatcgcttgcttccggataaaaagcgggatctttcagttgatccgcttccagcatgatttgctcctcaaacagagatttcagtacgatggcacctgcacctgcttctgccagtctcttatttttgccggcactgttggtcagtcccgaactactgataatgattgggtttctgagagaaagccctgcgaaagtagtttttaaatcggtcataattatatctttttaaagtagttggctactgattaatagtttctttctccgaatatcttgcttcctacccgtaccagagtgcttcctgcggcgattgcttcgtgatagtcatgtgacatacccatcgacaattcacggaaagtatctgaatcggcaaaccagtttgcttttatttcctgaaagagcctattcagtaaacaaaattcctggttaatttgttcaacatcatcggtgttgcttgccattcccatcaatccgcagatgcgtacgtgagacagttctttccattcgccggcatgcagcatatccttgcattcttcggggctgaaaccgaacttggtctcttcctgtgcaacgtgaatctgtaacagacagttcacgatacgtcccgctttggcagcttgcttgttgacttccgtcagcagtttgtacgtatcgattccatgtatcatcgctacgtaggggatcatgtatttgatcttgtttgtctgcaagtgcccgataaaatgccattcgatgtctttcggcaacgtttcgtatttagctgtcatttcctgcactttgctttctccgaaaatacgctgtcccgcctgataagcctcttctatcgcttcattgggatggaattttgagacagcaaccagccggactccttgtgggagttcggccagcacttgcttaagattgtcagcaatactcatggttacttatgcttttgacggatcaaactctggtttgtcattcggtccggcactgtaaggatatacatccatcaacggggtctcggataccataccgatctggtagtcggccatcgttcctttcatgccttcatccagcttcttcactgcgtcgcgcaagtcggcagcctgaaccagcacttgggtagaagtctttttctctgcaccgcttttttcgtcaagggtgataaagataagtttgcacttaaaccagcggtcggcactttcctcgtcgctggggaaaagttcgctatagttggcacgtttaatgtccgatactgtaaattctcctgttataaatggagtcatctcctcgataatacgtgcttctgcttctgtaaagctgagtgcatctaccagataaggttcagtcactttcttctgcattccgttttccatcgttttctcgtaacggattttgcactcaaaccaagtatgcattgccataatttttcttcttttttagtttattgattcgtgtaaattgcctacaaagataaacaaaatacgaagtaactaccgaaagatttttattttcttttatgcagattcctcaattcgaacgaaagcatgacgcggaaaagtccgatgatgaagaaagtaaaggaaatcatgtagaccacgtacaatgcacctactgccggttgccataatatgatgagagcacagatgatggcgaggataccgaaggccatataccagccccagtcgcgggtgccgtaacgtttgaggtcgatggaatagccggtagaggaaaagccccggaacatgagccagaaggcgatgataaacggaatcacttccatgctgaccatcggataggcaatcaggtaaatacctaagataaggtcgataattcctcctaccagataccagccccaactcggtactcccttgcggttgctgagggagaatataatttcgagaataccgcttatcagcatcgatatgctgaaaacgatgctaagtgccacatagctgctgagaggtgagaacataagccaaagggcgacaataatatacacgattcctaacaggagagaggtccaccagttttttactgaatgtttgatctcattgaaaacagtttccatacgttctttaattttaaatgaatactctgtgaatttgtggaggaataacaaattgattttagaaaaggttttcgtgtgaacatattccggggataagttgtttttattataaagtaattttaaaatgtaaatgcaatatggcaacaacaaatttcaaaggacaaccggtgaaactgatcggtgaatttatacaagtaggtaaagtcgctcctgactttgagttagtaaaaacagatttgtcttctttctccctgaaagacctgaacggcaaaaatgtgattctaaatatttttccaagtctggataccagtgtctgtgcaacatcggtacgcaaatttaataaaatgggagcaggtctgaaagatacggtagtattggctatctccaaagaccttccttttgcccacgcacgtttctgtacgacggaaggcatcgaaaacgtaatcccattgtcagatttccgtttctctgattttgacgagagctacggactgcgtatggcagacggaccgttggcaggcttactggcacgtgcagtagtcgtaatcggcaaagacggcaaagtggcatatacggaacttgttccggagattactcaggaacctgactatgagaaggcattggcggcagttaaagaataggtaataagtattaggtattaagtaataagtattaggtaataagtattagccgaagtcgcttatttcattattggcattaattatgcggagtattacttaatacttattacttaatacctattacctattactttacattaaaccttaaccacatggacaaaattcgatttttcttcatcgccctgttaggtatgggcgctgcacacttgtcggctcaaacggccgatagtacacaaacttctccctggacaacggaaggttttgccggactcaaactgacgcaggttagtttgaccaactggtctgctggaggtgacaattctgtcgcttttgacttgcaaggtacttatcaggctaactataaaaagggaaagcatatatggaacaaccgtcttgaactggcttatggcttgaataagacaggggaggatggcatgagaaaggccaatgataaaatatatatgaataccaactatgggtattctatcgccaaaaactggtatgcaagtgcatttaccactttccagacacaattctcgcccggatacgactattcagtcaataaggatgtcgctatctccgaatttatgtctccggcatatctgactaccggtttgggattcacatatgatccgggaaagattttcacggttgtattgtctcctgcctcttggcgcggcacctttgttctaaatgaccgtttgtctgatgaaggcgcttttggtgtcgatcccggcaaacatcttttgtcgagcttcggtgctaatctgaaaggagaggtgaaatatgaattcttaaagaacatgactgtatattcccgtctggacttgtattctgactacttgcataaacctcagaatattgatgtgaactgggaagtgcagattaatatggcaatcaacaaatggttctccactacgctgaccaccaatatggtctatgacgatgatatcaaaatagttcagaaagacggcagcaaaggatcacgtctgcaattcaaagaagtgctgggcgtaggagtgcagtttaatttttaagtaataagtaataggtattaggtaataagtattaagtattaaccgaagctgctgtgttatcagcttatccgcatggtttaatacttaatacttattacctaatacttattatttatttctcttcattcctttataaaccaggaagcccacgatgaatattccgattgcgatgaagcaatagccgatttcgtggctgtattctgttactttggcaatcagttgttcttcgctttcgatgccgggcactgtcgagaggtaatacccgattacggcgaggattgtattccataatccggctccgatagtggtatacaacaggaaggtgtgcattttcatgcgggcaagtcctgccggtatggaaatcagctggcgaactgccggaatcaatcggccgatgaaggtggaaagtgcgccatgcttgtcgaaataagattcggcatgttgtactttggcttcgtcgatcagacacatgtgcccgatgcggctgttggcaaatttataaataatgggacgtcccagccatttggccagataatagttgattaatgcgccgatatctgcaccgatagtggcaaataagactaccaagtaaatattaagctcgtcattgacagctgctttgtatgctgccggcgggatgatcacttccgatgggaaagggatgaaggagctttctatagtcattaataaagtgattgtccaataattcagatgttcgagacaccactggataaaagctactgattccatgtgtttttgggctaaagtttattaatatgattatttatttcctttctctttcttcatgcgcttccagacttctttgagcatttgttcgccttcctccgtttggttaggtctggatagcagatccagaatgatgtcctcgctgatcggatgggcactttcactgttgtacttgaagaagtcgtctatctcgttatgcatcagactgagaatactcagtttctctgtgacgtctgcatagttgggatcaatccggtatgactcttcaaaacagagtttggcttgatataagtactctgcgtccgaataggccgaagctaccaaataccacatttctgcactcggttccatcaccagtgctttgtcaaaagccttgactgccttttttttctgaccttccttcatgtagagtttaccttctgtcagatggataccgggatcatccggctggatctttttggcttttttacataacagatgcgcttcctcatgcttgcctagttgggaggcggctacagctttgttggtataagtatctatcaatagaggagagttgccggctccgtctgctacaaaacggtcgatgacacgttggtagcaatcgtctgcttcttgccatgctcctttgttggaatatgccatccccaaaaacatgtaacccatttcgggaggaaaggctttgtattctatcgcctttgtataattctcaatggcggcatccgaattgttcagatagaaatagcaatgtccgcggtaagcgtaggcttctccaaacgtctcgtcggcagccagtgcaaagtcacaggcttcgattgctttttcactgtcttcagctgcaaagcggcatttggcaagtcccacccagtaactggcattgtagggatccatatcaatcagttgattgtaataggtcgatgcggcttcgagttcattggtgcctgcgagatagtctgccatgacagctatgaaatcttcttttttaccgaatcggggggtacctttatccaaccattccttggcggcttcggggtatcccatatccatatagagatagatgatgttaataattgtttccagttcatccgtatcttctatggtatctaatgtgcttcgggctgcttccagttgtccttcgttcagcagaagttccgctttcagcatttttacatcagtaatataatcatctgtgatgctttctgcaacttttttcgccagaggtattttaccggtatcaagataaagataggcctgctctaccagtagatctgtgctgtcgggatgcaggtggaggccgtaagttatgacctcttgcgcttcgtcgaatttccgttcggcagcgtatcggtcagcaatgtcggctagttggtctccgtccagatagagttgtcggttttctgcttttgccgtttcatattgagcgattaactcgtttagttctttatttgcggacggtgaattttttctccccattctgatttattttgatttgaataaagcagcgctaaaaagatgtttaggcacggattacacagattgaagcggcttgtaagttacgtgaactctttaaatccgtgcaatccgtgtaatccgtgcctgaataatatcatagatttattccttattcggcttttggcactgcctttttatgtttaagtagcctgtgaaggctgaattttatttattgattttgccccaggtatcctttaatcctaccgtgcggttgaatacaagtttctccggagtcgagtctttgtcgatattgaaataaccgatgcgttggaattgcaggtatgagagcacaggcaaggttgccgcaaacttctcgatatagcaattcggcagaactttcaaagaatccggattgatgatttccttcattgcttccagagcttcgcagttctttgcttcacggatggcagccagttcgtcgcgtgggttttctactttccacagacggtcgtagaggcgtacttctgcttgcaggcagtggttgcagcttacccagtggagcgtacctttcactttgcggttggcatccggcataccgctgcgggtgttcgcgtcatattcacaatatacttctgtgattacgccgttctcatccttcttgcatccggtacattttacgatgtaagcgtttttgaggcgtacttcctgtcccggagtcatgcggaaatatttcttgggcgcgtcttccataaagtcttcgcgttccatccataattcacggctgaactcgatcatgtggcttcctgcttccggatcttccggattgttgatagcttccagttcctccacttgtccttccggatagttggtgatgatgagtttcactgggttgatgacagcagatacgcgggtagcacggctgttcagatcgtcacgtacggaactttccagcaatgcgatatcgttcagggcatcgtaagtcgtataaccgattttatcgataaatttatgaatagattccggagaataaccacgacggcggaagccgcagatggtcggcatacggggatcgtcccatccgttcaccaatccttcttttaccagcgtcagcaggttgcgtttgctcatcagcgtgtagctcaggttcagcttgttgaactcagtctgacggggacggttgtcgttcagatccttaccttctttcagccagtcgatgaagagatcatagagcggacggtgtaccacaaattcgagcgtacacagagagtgggttactccttcgaagaagtcactctgtccgtgggcgaagtcgtacatcggataagccttccaggtagtacctgtgcggtggtgcggatacttcacgacacgatagatgatcgggtcgcggaagtgcatattaggattggccatgtcgattttggcacggagtaccatagcgccttcttctatctcaccgctgttcatcttcttgaagagttccaggctttcttcgattgggcggtcacggtacgggctgttcacacctgcttgcgtgggagtacctttttgctgggcaatctgttcagctgtttgctcgtcgatatatgcttttccttcctcgatgaggcggatggcgaagtcccataattgctggaaatagtcggaagcgtagtattcgtttccccattggtagccaagccattgaatatcttctttgatggcttctacgtattccacgtcctctttggtcgggtttgtgtcgtcgaaacgaaggttacatacaccgccatgtctggcagcgatgccgaaatcaaggcaaatagctttggcatgaccgatgtgaaggtatccgttcggctcgggcgggaagcgggtctgcacttttccaccatttttaccttccttcaaatccttctctactgcctgttcaataaagttcaggcttttcttatcgcctgtgtcttcgtttttaatatctgtcataacgttaaaatgttaactctatttataggctacaaaagtaggacattttttttattttactggaatataaccgctcttttttataatctcctgtccttcgggcgaaagaatgaagttgatcagaggagctacctgctctttgttcttcacattataatagtaataaagggggcggacaatgggataagtcttgttcgttgcgttctccactgtcggggcggcgtagtggcttccgtcatacgaaacggaaagcgttttggtgcggggagatacgtatgccagcccgacgtacccgatggctcccttcgtctggctgacggactggatgatagcacctgtggcgggcatggaaaggctgcctgccatatagttcttgtttttcagcacgttttccttgaagaattcgtaagttcccgaagaggtttcgcgggaatagacaactattttgcggtcgtctccgcccacttgcttccagttggtgatttttccgcggaagatatcttccagctgctggcgggtgagctgtttcaccggattggaagggtgcaccactacggcaagggcgtcgtaggctacgatcacctcgtccacctcttgtccggcttctttggttttcatcttttcgctgaatttgatcggacgggaagccatggcaatatccgtcgtattatccatcagtgcggagatgccgaccccggtgcctcctccggtgacagtgacccgcgcatccggatgctgattcataaatcgctctgctgtttgttgggcaacaggcaatacggtgtcgctgcctttgatacgctgtgcgttggcgctgagagacagaagggaaagggcgattaataaatttcttctcactttcataattattctttttattgttggtgcaaataaaacaatcacatattacatttttgtttcagataagggagaaataatgtttgtaacacaaatgtaacagcattgaaatacttccttcaaacgttagtcacacctccttaataaggagttgctttctttgcatcagaaaaccaataggtatgaagaagatttttgagaaaataatagaaggaattctgacttgtagcggtttcgtaacaagtattacaatcctgctgatcgtgcttttcctgtttacggaggctttcgggctgttcaatagcaaggtgattgaagaagggtacgtgttggctttgaacaaaggcaataaggtaaatacgctgagtcctgctcagataaaggacgttttcgacgaggagataacgaactggaaagaactcggtggggaggatctccctatccgggtttttcgtttggaagacatcacggagtattatacggaggaagaactgggtccggcttacgagtatgccggcgaaagaatcacgcagttggtggagaagacgcccggtatcgtggcttttgtcccgcagaaatttatagtgcagcccgatgcagtgcattttatcaaggataataccatttcggtaaaggatgtctttgcgggtgccgaatggtttccgacagcgactcctgccgccttattcgggtttctgccgttgatagcgggtaccttgtgggtgagtctgttcgctatactttttgcacttccgttcgggctttcggtatctatctatatgtctgaggtcgccaatccgaaggtgcgtaactggctgaaaccgattattgagctgctgagtggtattccttcggtggtttatggttttttcggcctgatcgtcatcgttccgctgattcagaaattctttgatctgccggtaggggagagcggtttggcgggaagtatcatcctggctatcatggcgctgcctactatcataacagttaccgaagatgccatgcgcaattgtccgcgttcgatgcgggaagcaagtctggcgctgggagcttcgcagtggcagactatatataaggtcgtgattccctattcgatctccggaatcacttctggcgtggtgttgggcatcggacgtgctatcggagagacgatggcagtattgatggtaacgggtaatgccgcagtgataccgacaacaattctcgaaccgctccgcacgattccggcaacgattgcggcggaactgggagaagctccggcaggaggaccgcactacgaagcgttgttcctgttgggtgtcgtactgttctttataacattaatcatcaactttagcgtggagtatatctcttctaaaggaataaaacgtagcaagtgatatggaaatacgaagtaataataaagcgaaacaccgttctcagaggctggctttcggaattttccggttgttgagtctctgcatagtgttgattttgtttgcgattctcggtttcattatatataagggagcgggcgctatcagttgggagttcatcacttcggcacctacggacgggatgaccggcggaggtatctggccggctattgtcggtactttctatctgatggttggcagtgcgcttttcgcttttccagtgggagtgatgagtggaatctatatgaatgaatatgctccgaaagggaagctggtacgttttatacgagtgatgacgaacaatctgagcggtattccttctatcgttttcggtctgttcggtatggcgctgtttgtcaattatatgggctttggtgacagtattctggcgggttctttgacgttaggtttactttgcgtacctttggttattcgtactacggaggaggcattgaaagcgattcccgacagtatgcgtgaaggaagcagggcattgggggctaccagattgcagacgatctggcatgtgattcttccgatggggatgccgaacatcattacgggattaatccttgctttgggacgtgtttcaggcgagacggcaccgattctgtttacctgtgccgcttacttcctgccgcagttgccgacgagtattctggaccagtgtatggcgctgccgtatcacctgtatgtgatttcgaccagcggaacggatatggaagcgcagttgccgttggcttatggtacggctttggtactgattgtgattatccttctggttaatctgctggcaaatgcattgagaagatatttcgagaaaagagtaaaaacgaattgataagtatatggatacaataaaaatagatgcgcgtgatgtaaacttctggtatggtgattttcatgccttgaaagggatcagcatggagattgaagaaaagtctgtagttgcctttatcggaccgtcgggatgtggtaaatcgactttccttcgtcttttcaaccggatgaacgacttgattcccgctacccgtctggaaggtgaaatccggattgacgggcataatatttatgccaaaggggtggaagtggacgagcttcgcaagaatgtgggcatggttttccaacgccctaaccctttcccgaaaagcatattcgagaatgtcgcttacgggcttcgcgtcaatggagtgaaagataacgctttcatccgtcagcgggtagaagagacgctgaaaggggctgcgctttgggatgaggtgaaagataaactgaaagagtctgcctatgctttatccggcggacagcagcaacgtctctgtattgcccgtgccatggcggtatctccttcggtactgttgatggatgaaccggcttctgcgctcgatcctatttctacagccaaagtagaggaactgattcatgaactgaagaaggactatacaatcgtgatcgtaactcacaatatgcagcaggcagcacgtgtcagtgacaagacggctttcttctacttgggagagatggtagagtatggtgatacgaaaaggatattcaccaaccctgagaaagaggctacccagaattatatcacaggacgtttcggctaagcgccaccggagtgtttgtgaaaaacgagaatattaatcatttatatataaatagactatggtaaagtttatagaatcggaactcattctattgaagaaagaagtggatgaaatgtggacactggtgtacaatcagcttgaccgtgcaggggaagcagtcatgacacttgacaaggaactggcacaacaggtaatggttcgcgaacgtcgggtgaatgcctttgaactgaagatcgacagtgatatagaggatatcattgcgttgtacaatccggtggcgattgatctccgatttgtgctggcaatgctgaaaatcaatacaaatctggaacgtctgggagactttgcagaagggatagcccgtttcgttattcgctgtaaagaaccggtgctggacgccgatttgctggctcgtctgcgtttgggagagatgcaggcagaggtattgtccatgctggaactggcaaaacgtgccttgaacgaagagaatattgaaatggcaacggcggtattcggcaaagataacttgctggatgatatcaatgcggaagccacaggcatcctggcagattacatccgagaacatccggagacggcgcatacatgtgttgacttggttggcgtgttccgcaaactggagcgttcgggcgaccatattactaatatagccgaagaaatagtcttctttattgatgcgaaagtcttaaaacatagcggaaaagtggacgaaaactacccgaaatcgtaattttttgcatgtttttaaacaaaaattagggctacttagaaaataatcctatatttgtcccttgtaacggacaagttatgggcggttttgcgtcaaatgataataaatccaaagaaatttcaaaaagatgttatatgacatgttttataatttggagagtatcagtaaaagcgactatatttgcaccgttatcctgaaaacaatctttttaccttaaaaaaaaactaatacctattgaaaactgaaaaatggagctttgtgaaaagccccatttttttttgctcttattttttaagctccttccttatttgtatctttgagccgtactaaaataaataacattatgttttctggaatcgtagaagagtacgctactttggtagcactggtgaaagaccaggagaatatacactttacatttaagtgttcgtttgtaaatgagctgaagattgatcagagtatttctcacaacggagtatgcctgacggtagtgagtctgaccgatgatacgtatacggtaactgccatgaaagaaacgctggatcgttcgaatcttggtttgttgaaagtgggcgataaagtgaatgtagagcgcagcatgatgatgaatggccgactggacggacatattgtgcagggacacgtagaccagacagctacttgtgtggaaatcaaggatgcggaaggaagctggtattttacatttaaatatgcatttgataaggaaatggcgaaacgtggctatatcacggtagacaaggggtcggtgactgttaatggtgtcagtctgacggtatgcaatccgacggatgatacttttcaggtagctattataccttatacttatgaatataccaactttcatacatttgaaatcggtagtgtagtgaatatcgaatttgatatcatcggtaagtatatcagccggatgattcagtatagataattaaaaaatagatgtctgatggattttctgcaattggtactgtctcgtcagagtgaccgggcgtatgataaagagcgtccggtagaagcggagaagctggagcgcattctggaagctgctcgtctggctccttctgcctgcaatgcgcagccatggaagtttgtggtcgtgacggaccatgagctggcttcaaaagtggggaaggcggcagccggactaggcatgaataagttcgccaaagatgcccctgtacatattctggttgtagaagagtctgccaatattacatccttgcttggaggaaaagtaaaaggcaagcatttcccgctgattgatattggaatcgctgctgctcatatcacattggctgcagagaatgaaggactgggttcctgcatcttgggctggtttgatgaaaaagagatcaagcaattgacaggtattcctgcttccaaacgtttattgctggatattgcaatcgggtatccggtgaaagagaaacgaaagaagatgaggaagccgaaagaaaaggtcatttcttataatcaatactaattgaaaaaagattactccttggacttgccggagtagatatacagtaaaaagcctcgttggtttaaaaggaagaggtcgttcctttaaaaccaaggaggctttcctttaaaaccaacgacctgtttcttttaaaggaaaaagtagaagtctttaatctcttgattatgagatatttgcctgaatgtgattctcgaaattgagaattggtaaaaaacaaagacgtttatgggaatttctataggtctttcagtagcactttgcttgccttcttatagtattcttctctggattcagtcagtactttccattcgtcattaaactcctcatccttgtcgatcttgaagttttcggacccataagtatccagtcggtcgagcaagatggctacattcagttggttgatatccatagagggctggtagccgatatcttcacttttttggtcggtcactacctcgtggatcaagtctatttcttgtaattgatagagtacctgattagtcagccggatggggatttgatgctcttccgatatttctgctgctgtatagggcggttcattcctttcgaaacgtttggcgataagcgacatgatcaggatagagataaagtcccggtaacgtctgctgatgttgcgggtatcctgatcgaaactaaagctgcggatattttgtccggcatacgtcaattcagctccgaacagacagatggtccatgagatttgcagccaaagcagaaacaaggggagggcggcgaagctaccgtagatagcattgtatttcgatacccataactggctgttgatatacaggaactggaaggcctgataagcggaacctgccaggatacctgcaatcagagcgtgcttgaatttcactttcgtgttgggcatgaagatatacagccctgtaaacatcagccaagtcaaaacaaatgggataaggcggatcatgaacttcatgacgggagccagtaaaacgaaatcgtccatctgcttcagcacggtactcacaaacagagaaagaccgcccgataccacaatcagaatcggcatgagcaggaacatggagaaatagtccgtaatcttccggtacatggaacgcgccttctttacttcccaaatacggttgaaagtgatttcgatattgctcaccagattgatcacggtccatagcaacatcaccagacctaccccaatgaaaataccgcctttggtttgcgagaggtaggagttgacgaaagaaagaatagcttccgtcgtttctatatttcccccgaagccgctccgaaactggtgctccatcagattatcaaatccgaatccacgggccacggcgaataggatggcgagtataggcacaatagcaagcagtgtgctgtatgtcagtgctgaggccttgtttgccatccggtctttagtaaatcggttgatacagagatagatggttttgataatattgtagagcgagaatttcgttctagtcacttcatcttccgtgatgcgccagatgtcatacgtgatgaatttccatatatcggtgattttcttcttcatggctcagaattttaaaaaagcagtttaaaaaagaaaaaagcagtcagcctgtaagccgagttctgtaccttatagatataaggtgcctgtcatttatctgagtggcgtgtcaccacgacactttagcggtctaccctccgacatggagcgagcagctctcataacgccggtttacatgaccttacaactcctaagacgtacagcccgtatgtcaccatacgactggtaggctcttaccctaccttctcacccttacctctccccgaaaggagcggcggttattttcttctacgttactctaccctcgcggacagctttctgttaggaagtaggatgctctgtgttgcccggactttcctcctgcgcgaaacgcgcacgcgacagaccggccaactgctttagactgcaaaagtacgtcatttattttgttttagccaaagaaagtgtcacaaatagaaataatttctacctttgctatcattaaatcatgattcaatgaagaaaaatatcctttttttctattgcttgctggtagtaacggtagttagtctgaaagctcaggaaatacgccccatgcctgctgattcggcttatggggtagtgcacatttctgtttgtaatatgcgcgatgaaggtaagtttacatccgggatgagtacgcaggcgctgctcggaatgccggtcaaggtattgcaatataccggctggtatgagattcagactccggatgactatacgggatgggtacaccggatggtgattactccgatgtcgaaagatcaatacaatgaatggaaccgtgctgagaagatcgtggtgacttcccattatggatttacgtacgaaaaaccggatgatgactctcagaccgtatcggatgtcgttgccggcaaccgtctgaagtgggaggggagcaaagggcgcttttacaaagtgtcttatcccgacggtcgccaggcatatatatccaaacatatttcacaacccgaaacgaagtggagagcttcattgaaacaggatgtcgaaagcattattcaaaccgcctatacaatgatcggaatcccttatctgtgggcgggaacttcttcgaaaggagtcgattgcagcggtctggtccggacagtgctttttatgcacgatataatcatcccgagagatgcgtcgcaacaggcttatgtaggcgaacgcattgaaatcgctcctgatttctccaacgtgcaacgcggagacctcgtctttttcggtcgcaaagccacagccgaccgcaaagaaggcatctcgcacgtaggcatctacctgggcaacaaacgcttcatccatgccctgggagacgtacatgtcagcagctttgatcccgaagacgaatactacgacgagttcaacaccggccgtctgctttttgccactcgcttcctgccttatataaataaggagaaaggcatgaataccactgaccataacccctattatctatatgactaatcattatcaattatccattatccattcaacaaatgccaaatagaagagatttcctgaaaacggccgcctttgcaactttaggctccggaatagctgtcagtcaggtattggcgggagaatctatagcttccaccattcatataaacaaacagggtatgggaggaaagatgaaaatgacttttttcccttatgagttaaagttgaggcacgtctttacggtagccacttattcgcgtaccaccacacccgatgtgcaggtagaaatcgaatatgagggagtgaccggatatggagaggcgtcaatgcccccttatcttggggagacggtggagtcggtgatgaacttccttaaaaaagtaaatctggagcaattcagtgatccttttcagttagaggacattttgtcatacgttgacagtctgtcgccgaaagacacggcggcaaaggcagcggtagatattgcccttcatgatttggtgggaaaactgctgggagctccgtggcataagatatggggattgaataaggaaaagaccccttccaccacctttacgatcggtattgatacgcccgatgtggtgcgcgccaaaacaaaagagtgtgcagaccggtttaatatattaaaggtaaagctagggagagacaacgataaggaaatgatagagacgatccgttcggtgacagatcttccgattgccatagatgccaaccagggatggaaagaccgccaatatgcgctcgatatgatccattggctgaaagagaaggggattgtaatgatagagcagcccatgccgaaggaacaactggatgacattgcctgggtgacacagcaaagccctctgccggtgtttgccgatgagtcgttacagcgtttaaaggatgtggccgctttgaaaggtgcgtttacgggaatcaacatcaaactgatgaaatgtaccggtatgcgtgaagcatggaagatggtgacgctggcgcacgctttgggaatgcgcgtgatggtgggctgcatgacggagacttcgtgtgcgatatctgccgcctcgcaattttctccggcggtcgattttgccgatctcgatggcaacctgctcatctccaacgatcgctttaaaggggtagaagtggtgaaggggaaaatcaccttgaatgacttacccggaatcggtgtcatgaaaatctgatcttactgaatgaatgtcagactgttaaagccatctgacatacaacgaatgtaaatttgtcagttgctgtcgttaagcgctgttaagcctcaaatattctctgttaaaagaggacaaaaaagagtgacaagtagaataagtgaacgatatttgttattattttaacgtcgtaaaagttaaaacaatgtcgaatattaacattttaaagaattataaatcatgaaacagacaacaaagaacattctgggagtaggagctattattcttcttagctcaggagttgcaggattgacaacttacaaattgttgcaatccaatgatgctgccaaagagacatcttttaatgagatgttccagcagaatcccaatgtcaaattggctgcttttgacgcggtaaacgctcaaccggttgacttgacacaagctgcggagaattcgcttcatgctgtcgtacatataaagtctactcaggaagctaaaacaagaaccgttcagcaagcgccggatatttttgacttcttctttggagacggacgcggacagcagcgtcaggtacaatcccagcctcgtgttggttttggttccggagtcatcatttccaaagacggatatatcgtaaccaacaatcacgtaattgaaggtgccgatgagatcagtgtgaagctgaatgataaccgtgagttcagaggacgtgtgatcggtactgacccgagcacagaccttgctttgatcaagattgagtctgatgatgatctgcctactattccggttggagattccgaaacactgaaagtaggagagtgggtactcgccgtaggaaaccccttcaatctgaactctacagtgacagcaggtatcgtaagtgccaaagcccgtactttgggagtatacaatggcggtattgaatctttcatccagacagatgccgccatcaaccagggaaatagtggtggtgcactggtgaatgcgaaaggcgaactggtaggtattaactccgtgttgtcttcacctacgggagcatacgccggatacggctttgctatccctaccagcattatgactaaggtagttgccgacctgaaacaatacggaacagtacagcgtgccctccttggcatcaagggagcttctttgggcagcagcatcatggaagatcagagtcctatcgataagtccggtactacactgcgtgataaagcgaaagaatttggcgtggtagacggcgtatgggtacgcgaaatcgttgataacggttcggctgccggtgctgatatcaaggtggatgacgtaattgtcggtttagataacaagaaagtacataactttgccgacttgcaggaagcattggctaaacaccgtccgggcgataaggtaactgtgaaactagttcgtgacaagaaagaaaagtcagtagaagtgacgctgaagaacgaacagggtactaccaagatcgtgaaggaagctggtatggaaattctgggtgctgcattcaaagaactgccggatgacttgaagaaacagctgaatctcggctatggtctgcaagtgacaggcgtttcttccggtaagatgtcagatgcaggagttcgcaaaggtttcatcatcctgaaagctaacgaccagccgatgcgcaaagtaagtgatctggaagaagtgatgaaagccgctgttaagtctccgaatcaggtattgttcctgaccggcgtattcccgtccggcaagcgcggatactttgcagtagacctgactcaggaatgagttataaattaaggtaagaagattgtaggataagctaatgaaatagaaaaaggatgccgtcatacaacttgtcggcattcttttttgttttattagttgaaaatatagtgaaaaagttgcctaaatatgtatgttaacaaattatttgtcgtaactttgcactccaaatctgtttttaaagaatgagacaactaaagattaccaaaagtatcactaacagagagagcgcttctcttgacaagtatttgcaggaaatcggccgtgaggacctgataacagtcgaggaagaagtggaactcgctcagcgcattcgtaagggtgaccgtgtagcattggaaaaattgacacgtgccaatcttcgtttcgtcgtatctgtggccaagcagtaccagaaccagggtttgagtttgcctgacttgattaatgaaggcaatttaggactgatcaaggccgccgaaaagtttgatgaaacacgtggattcaagtttatcagctacgccgtatggtggattcgccagtctattctgcaagcattggcagagcagtcgcgtattgttcgtctcccgttgaatcaggtaggttcgctgaataagatcagcaaagccttctcaaagttcgaacaggaaaacgagcggcgtccgtctcccgaagagttggcagatgaactggaaattccggttgacaagatctctgatacactgaaggtatccggccgtcatatttcggtggatgcgcctttcgtggaaggagaagacaacagcctgttggatgtgttggtaaacgacgattcgcctatggcggaccgctctctggttaatgagtctcttgcgagggaaattgatagagctctttctacgttaaccgaacgcgaaaaagaaatcatacagatgtttttcggtatcggacaacaagaaatgacattggaagaaatcggcgataagtttggcctcacacgtgagcgcgttcgtcagattaaagaaaaagcaattagaagactaagacaaagtaatcgtagtaaattgctcaaatcctacttgggataagtgaggaatatcagtttctgaaaaaaaagaattagggtcgcataagttgcacttcttggagtaatcatctgaagaatgtacttatgcgacttttatttagccgttattcgtcaatactatactatgcacaattttatgaagaagtctgctctgatattattcacgcttgttggtctgaacattggcatcgtagccaaagccgaacaacccttacgggaaaaagcccttgcagcgaaaacctattgcgtagagaaagggtttaatacgaattattgctttctggtagatttcagcattccttccggcaaaaaacgtttctttgtctgggatttcaaaggcgattccatcaaatattcaagtctgtgtgctcatggatatggtaaggagagcacgccgaagaaaccggtatatagtaatgtggaaggcagctattgctcttctttggggaagtataaggtaggaatccgttcgtatagtaaatgggggattaatgtacattataaactgcatggattggaatcgaccaacagcaatgctttcaagcgttacattgtgctccattcgtatactccggtaccgactttggagatataccccatgcatcttccattggggattagccagggatgtcctgtgatctgtgatgacgcgatgcggaaggtcgatgcactgctgaaagtcgagaagaagcctgtgttgctatggatatatgaatagaaatactaaatcttaatgataaatagatgatatttcctcttttttgttacctttgccacaattaaaaatttatgatatgaaatacgtaaaaatactatttgcaatggcacttgtgttgacaatgtgctcggctttctctttaaagaaagaccactcaaaaacagtttatgccttcggaattgccgcttcctttacggatacagtcgtgtattttacggatattcaaatattggatagcgcaaaggttagcaaggaaggttttctgactcatcgtgatctgtacagctatcagctgaagaattatgtggaagataacggactgcaacagaatagtacctgtatgatctatttctcagaaaacaggaaaaaactggagaaagaggcaacgaagattctgagtaaatataaaaggaacaggaataccacagtaacacggattgatactgataaattccactttataaaaccggaagagtaaaagattaattgttaatatgataagagatgcaggtttgcatctcttatttttttatctttgcagccgtaactaattggtaatctaatgaaaaagattaaaatattatcccttctcatgggtttggctgcgttgtttgcagcttgtgagaataatgaaaacgaaggtcctgaaggacccgaaccacgtgagcaggtaggacgtacagtgttggtctatatcgtgggggatgcaggagatcttaataatgaattatccagcctttttaagatcaactttagcgatatgaaggcgggtatggaagaggttgattattccaagtgtaatttggttgtttatagtgagatggtaaatgacgttcctcatctgatttcattgaaacagaagaatggtaaagtagtggccgatactctttttacttatgatgaacaaaatccgctggataaggaagttatggccagtgttatttcccaaacagttagttatttcccggcagatagttatgggtttgtatttttgtctcatagctcttcatgggtgccggccagtaataatgcgaactctcgctccatcggatattatcgtaggactcagatgaatataccggatttccgtgaagcattgtcctctgcttttccaaaaccattaaaatttatattgtttgactcatgtaatatgcaatctgtggaagtcgcctatgaacttcgtgactgttccgaatattttattggttctcctacggagattccgggaccgggtgcaccttataaggcagtagtaccggaaatgtttactgaaacaaatttggcgacgaatatagcagaggcgtattatggatattatgaaaaatcttatacaggggttgctcctgttagtaatgagaattggacgggaggagttgctacttctgtgataaagagtgcggctttggataatttggcagcagcaaccaagacaatcattcctaaatatattcaagagaaaagggaagtagaccgtagtgatatactagcttatgattttaacgatgacgctaattatgattttgaaaaactgatccgaaatttgacaggtggagtagataatacggattatcggtcttggtatacagcctttgaagcagctgttgtatataggaaaacaactctcaaaaactattccggtatcattcatagaatgtttactatggaaggttcggaaggactctctacatatatacctactggcgcaagcaattctactatgaatactttctatcgtactttgtcatggtacactgctgccggatgggatggaactggatggtaagaataaagtcagaataaaaagaaagtgtgccgccctgaagcagcacatttttttttatctcccccctacaaccattcatactccttcctcgcaacctccggacacttgattcagacatccgcacttaactgataatgccctacgattttcgcctgtggaaataacagtttcagttctcctaatatccgtagtagcgtttctttttgttacgtcgccgtgtattcattggtgctaccccctccgggtttctcgtcaagtttcggagaatcttcgttttcttcctcagcatccgctttgtagagagaatatttcatcaccttacacatatgttttattaaaacgctgcaaaggtaaaaatcgtttgcaggtgtggaaaaaccgtgaagcaccgcattggtaataagggtaaggagagtacattcctttttatttcgacaaaaaaatcggttgaacattgtgtagggtagttcattttatatagtttatggcgaaaaaagaatctcaattatgaacttaaaaagaaaggattatatgaaacagcatagctttacagactttgtttacgaagttattggcgagttgcggcaagagaaccgttttgcgacggcctatatctatcactatgccttgcaggcattcaccgcttctgtaggtggtggcaaaatattttggggaggactgaaccgaagaagcttgtgtaaatttcaatattatctggagaaagagcagaagagttataacacaacttctacttatatccgtgcgctgcgtgctatttataaccgtgcggtagatcgtggggttgtggcgggagaatgtcgcctgtttgtcaatctcaaaacaggggtatcttccgaacataaattggcattaactgccgggcagacgagccgattgctgggtgatgttgttgacggaaagtattcttccggcagactctccagtcctgtactccctccggaggtgtaccgggcgcaggacacaatgcgattgatgctgttgctgcaagggatgccttttgtagaccttgctcacttgcgcaaagtggatttgaaaggggacctgctgatatgccgacgccaaaagacgggtactgaactttgtgtcaagcttatgccgcaggcacgtcagcttatcgaacgttataggagccgggaagaatcttcgccctatctgttggatatccttactcccacttcttccgatagagaagcttttgatgattatcgccgttgcttgcgtaagctgaacttcaacctttcgagactacccggactgatgggaatggaggaggtaaaagtcagttcctacacggcacgccacacttgggctacacttgccaaatattgccaggttcccgaagaggtgatttccgaaggactgggacattcttcacttgaagtcacacggacgtatctcaagagttttgaaggggaggaacttaatcgggcaaatatagtcgttaataattacataatcacaggggaaaagagaatgtggaatgaagcttaagatgctgttacttcgtaagtaacagagagttattgatgctgcaaagatataagaattttaataaaaaatatattatttacaaagttattttcattagatcactaaaaaagtttcgacacaaggcaaaaaacaaggatagggatacatactagttgcaagagttatgaaaacgcatataactttttcttcccactttgaaatgaataaagcggaatacactgctatttgtctttcttgacttaaataatctgttgataatcagaattatggtagaactgcgctctgttctgtcataaaacaagtttctgttacttacgaagtaattttcgcctatacaaacggacaacttaagtataatgaagcaaaaaaataaattcataaaagagcgtcttaagcacaaacaggagcagctttccatgcaggcaatcagacaggaacgtcttaaccgtaccatgcaaaataccaaagatgatattgatcagctcatctatgcccttcacgaactggaagaagccgaaaaaggtaatcataaacgtcatactattccttataatgaagtcttcagtttctttacgcgcatctgccgtctgttcgactatcttcaacaccgttgccataaatattttaattaccggctgacctgccttgtgatacacgcccattaccgatttcgcagccggacacgggcacccggtcgtgagtatcttagtcccggaaccatacttacctatttcaagcatgaatgggaaatggttgtataacttcgaacttaaaataatcattgcatttataacacttcttttttcttagggatctgatagcgatttacattattaattaataactagagaatatgggaaaattaaaacatttaggtatgtcactcctcttggcaacaacatttttcagttgcggagatgactatgacgacactgctttgcgcaacgatgtgaacgaccttaaatcgagagtagaaaaactggaatcatggtgcagcactaccaatacacagatcagcgccttgcagggactggtttcagcattggaacagaatgactatgtgaccggagttactcctattgtagaaggatcagtagaagtgggttacactatcactttcactaaaagcaagcccatcaccatctatcacggcaaggatggtaagaacggtgctgacggtataaacggtgtcgacggcatcacccctcttattggtgcggagaaagataccgacggtatatattattggactataaagctcggtgatgccgattctgcatggttgactgatgctgataacaataaaatacctactaccggtaaagatggagaaaatggaaacgatggtgaacctggaaacaatggtgagcctggtaagga

SEQ ID NO: 4757 - DNA, 1105 bp, Unknown
  gut microbiota DNA sequence
tttgaaggcaaactgtactggaaagtagatgatgaatggttactggacagtaatagtaataaagtggctgccaccggtgaaaagggagataccggttccgctgggaaagacggggagaaaggtccgcaaggtgagcagggggattctgttttcaaaaaagacggtgtgaaaatagaagacggcaaagtgatcttcacattagcaaatggaaaggaattcacgcttccgatgctagttgacggcctcgctgtgggtattggtggcagcgatttgttctatgcatcgccttcagacaattctatagatgtcacttttgcttctactatgaaagaggaagattataaatccattgttgctactattacgaatggtaatgaagcagactggattattaaaagtcgtggtgcggtagatacatggaaagtagcagtaacggaaccgactttcaccggcacagacggaacatatactccgggaagtgcaaagattactattacccctccggcaaatgtcaaactgtcggatacagctctattgacggtgacagtgactgacgctaatgatggtacaatatcagtttcgagagaagtgaaatattttgatggtgagatagtggcatgtaccggaggtgatttaagtatcaaaggattggatacatctgtgaaaagactggccctaaagggctctattacggtagaagattttaaatatatcagagaatcattaactgcacttgaagtgctggatatttcgatgaccgacttgactgaactgccggatcgtgcattacgtttcggtggtgatacaccaaacacttcattgaaagcagtcagactgcctttatctatgaaaactatcggttatgcagctttcactaattgcagagcattgacaagtattgatactgagaatgtggaaatcataggtgaatgggcattcgaacaatgccgcggtttggtggaagtgaaattgcacgacggattgaaagagattcgtagacaagccttcaataactgtatttcactgacattgatagatattccaggtagtgtaacagatttgggcaaaaatacagaagtatctacgtcacagtatgaaggttggg

SEQ ID NO: 4758 - DNA, 1065 bp, Unknown
  gut microbiota DNA sequence
gaaaataataaaaaagcatctgaaatggatgaatatgtttaaggttcgttattcttatggtaaggtcggtaatgataatgtaggaacccgtttcccatatctttattcaattgccgataactataaagaaaatgatcagacgaaatattatgcaggttacaactgggccacttatggaagtaataaatcttataatggtttacgctatacaaaacttgcttctaatgatataacatgggaaatagcaaccaaaagcgaccttggtatagatatggctttatttaatgacaaattcacagctacgatcgactattttgatgaaagtcgtagtggtatttatatggagcgtgcattcttaccaggaatggttggtctggatggcaataaaccttatgctaatgtgggtgaagtaaattcaaaagggtttgatggaaactttagttataaacaaaaaattagtgatgttaagttcactgtacgtggtaatatcacatatagtaagaatgaaatcatagaacgcgatgaagagaacaatgtttatgcttatcaaatgaaaaaagggtatcgggttaatcaaaatagaggcttgatagctttaggattatttaaggactatgatgacattcgtaacagtcctacacagaaatatggtcctgtaatgcccggtgatattaaatataaagatgtaaatggtgatggtgttgtcaatgatggcgatatcgtagctattggttcaactagtaaaccaaatctaatttatggtttaggtctttctgctacctggaagggattggatgtaagcttacatttccaaggtgccggtaaatctcagttctttacttatggcaaatgtatatgggcttttacagaaggacaatggggtaatattcttaaaggaacgctggataatcgttgggtggatgcggagactgcacaaaagcttggcatccctgctaatgagaatccgaatgcatcataccctcgtttgagttatacggataatggtaatggtaatacaacgatctatgaatataaaaataattaccgtaattcgacatattggtt

SEQ ID NO: 4759 - DNA, 1431 bp, Unknown
  gut microbiota DNA sequence
gaattattaccgtgcttacctaaagaatggaaaaacggaaattttaaaggactttgtgctcggggaggtattgaaatagatgcgagttggaaaaatagccaaatagtaaatgcagtactaaaagctaccgctccaatagaatttactcttcgtctatcaaatgcaaaactatactgttggaagctgaacaaaaaaacattcattcctaaaataaaggatgatggactaatttatatatccatgaataaaggagataatcttaccataatcatcccttaataacaattttgcagtaaatgcgttattttttgctgcgtttatacactattaaaataacacatttacctaattttgactcgttgaatttagaaaattatcacattaaatctaataatatatgaaacgaattcgagatttccccaccactgacaagacaacgatctagttgcctgaaatgtattaacctaatattaattttaaattatccatgaaaaatatgaaagaaagactcttttcattctttaaaatgaatcgactgattccagtcatactctgtcttttctttgcgacaagtatatatgcgcaaaatagagaagtgaagggtatagtgacaggtgacgataatgaacctatggcaggagctaccatcaaaataaaaaacagtcaaggtggtgcaattgcagatattgacggaaaattcactatgcgagtaaaaaccggagatatattagaaatttcgtttcttggcatgaaaaagcaagaaataaaagtagatagtaacgacttttactctattaaattatttcctgaagctaatgagtttgacgaagtaacggtagttgcttttgccaagcaaaagaaagagagcgtaattagtgccatctctacagtaaatccacaggaactgaaagtaccgagtagcaatctgacaaccgctcttgccggaagaatgtccggactaattgctttccaaacaacaggtgaacccggtaaggacaatgctcagttctttgtgcgtggtgccacaacatttggttataaaaaagatcctcttattttgattgacaacattgaattgagtacagatgatcttgcccgcttgaatgtggatgacattgctcaattttctattatgaaagacgctacagccactgctttgtacggcgcgcgtggagcaaatggagtaatccttgtgaccactaaacaaggagtcgccggaaagccgaaagtatccgtccgtgtagaacaatcagtatccactcctcgaaagaaggtggaattaacagatcctatcacctttatgcgattaaataatgaagctgtaaactctcggcgtgatcctaacaatcctgccgccagcgctaattacacagtttatagtcaagaaaaaatagaaaatacaattgctggtaccaacccatattgttatcc

SEQ ID NO: 4760 - DNA, 1110 bp, Unknown
  gut microbiota DNA sequence
gatgtcagactgtatcgtttgataaatttcgctgatgtgacgttttctgcttcacctactttggcaatggcataaagcaattccttttgcttttcgggaatattggataagatttcccgaaagattgtatcattatatgcaataaggttatctatagctgttttgataatttccagtgtacattctttccctttcggtgtatctgcaaaagcttcattgaatgttttttggatataaaaggtatgtcctttgaatagccgatatactttttctatattttcgatttcaatatgccgttttcttttttggaaatggtctgcgataaatggtatatagatttccggtgcaatggctttcagttccaaaatatcggcactgtggtagaatggacgggatgaagatagaaacatttcctgcatcatgtgccgttcacttccggcaaagatgaagttgctgttttctattttctgtatgtgtgtgcgtagtaatgcttctatatttttctcgggatatttagcaatttgttgaaactcgtcaatggcaacgatacaaggtttgtctgctgctatcagacattgaaatatttcttccagtgtatattcgggtcgatcaatatcccccagttccagattgaaagtaggtagattggtcagcgggtcaaatccgaatttaccattgattgatttaagtgtgtggataaacaggcttgccattttcttactgcggggcaatagtgtttcataaatttctttgccaagcagataagtgaattctcttaagcttgatgtatggagtatgtcaatgaagaaagtataatattcttcttttatttcaggtttctcataacagaaacggattagtcccgttttacccattcttctgggtgagataatgacaaggttattgccattggttaatgatttaaccagcctctctgattctttcacgcgatcgcagaagtactcgggttctatttttccagttactataaatgggttaatttcttttgccatacctgtttcaattttccgtaaaggtagttatttaaatagaattatgcaaatcgaataatgttaataaagtgtctagtctagttttatatttatcgga

SEQ ID NO: 4761 - DNA, 224 bp, Unknown
  gut microbiota DNA sequence
agccagaacacgatccgccagcagatctctcctgaaggcaccatcaatattcagaagatcgggcctgtcaaccttagcggtatgacagtctccgccgccaacgactatctgaagggcgccctgaataagatctataacggcctgaacaatactaccgaccctacttccgacatccgtctgactttgggtaatatccgtactatccagatcaatgtgatgggaga

SEQ ID NO: 4762 - DNA, 425 bp, Unknown
  gut microbiota DNA sequence
ccattctcatcggacaccgctacgcggaaagtcacttcaccatctttcagcttacttccggcatagaccgtagccgtatagcggataccctcacccggaagaatttcttctatcattacagtaggagaaatgccgatatgtttcactttcccgaccgtctctacaataggaaccacgtcataaaccggattccgtccttcattcatgatttcaaagatgatcttgctgctttctcccccgtctatcgcatgattgcggttatcgtcaataaagcgaatcttgcgcagtttcaactgagtcagttgctgctgagtctgtgtccgaggtttaaacttagagtgagactgcccctgtctgacttccggaacgtaagcatattcctctatcgggtccggtttcggagcagtcagcgcattccctatcgc

SEQ ID NO: 4763 - DNA, 168 bp, Unknown
  gut microbiota DNA sequence
acaaggtcgcgtagctcaactgaatagagtagctgactacggatcagccggttacaggtttgaatcctgtcgcggtcacttctaccaacatttaacaaggtcgcgtagctcaactgaatagagtagctgactacggatcagccggttacaggtttgaatcctgtcgcg

SEQ ID NO: 4764 - DNA, 710 bp, Unknown
  gut microbiota DNA sequence
ataatcgattttctttcacaaaagaataaagatagagaagaactccggtcatatgttcttctctatctcttatatttgataatttatccaatattaatcaatagacaaaactatttaattcccagcctcccagtcaatagcttgatcttcatctggtatttgagtattgatctgacgctctaaagccaaagaacctattacatgatattcggtttctacccccggaattgtagtatagtcaacataagtgtaattaatatttctaatgattatagtcttacgtttcaaataaggacgaataggatccattgtttcagttacactataggtaggggttacctctttcccatagtcatctttacctatttgaaatttcattttattgtcagaatctgcaggagataattccacattgccgatttctccattatcattatttataaatttagcaagaatcctatatcctttcctatcgacacgggtttcatcaataatgccagcatagaaaaaaaggctttgatcgtccaccacataagtcattacatagtttttgacaaatggggcctcactttccgctcctttgatataacacttataatttactgcactataattgcccgaataatcattaaaaggcataacacggagtaatgctttgcgataatgcttacgataattaggggtatagctaccatctgaagattcttcaa

SEQ ID NO: 4765 - DNA, 726 bp, Unknown
  gut microbiota DNA sequence
tgatctcctttcaaccaataacaggtcacttcatccaaatattcgccaatgtaaggacgaccacgatgatattgtgactccacatacaattccatctgacggaaatatacactgtcagacaatacggtctgcggataattgttcataaagttagccattgctgtcaatgtctgtgcagaagcaaacggccagatagctccgtcccactcacacttacccactccacgtgtacggaattccggatgacgacgctctgcagtagtcaatccgtaaggagcagagaaacctttttcatccagaatctctttccaggcaacttcatatttctttgtcgtatccggcaggttgaaataccagggaatatatccgattgcttcacgaacatttgctgaagaatccgtacgcatcgtctcaaaaaactggtgacgggtattccacaactcattttctaccagatttctcaacgtgtctgctctcataccatatttcatagccatcccctcgtcaccggaaagaattcccatacatgaaagtgctttggcattgccatacatataactattgattgtcgggcgggcatattttttcttccgtccaccactgatagattcttccataccatcctgtacatccccctgccagtacaatccattcttcaaacgattcgtacgttcccaacgttgatattcagtttccagatcttttttcatatccagcataaaatct

SEQ ID NO: 4766 - DNA, 519 bp, Unknown
  gut microbiota DNA sequence
accgacaggcatatccacacaggcacatcccagcatattcaggcgaacggcgatcttactcttgccatccacatgaaccagttcgccaacaagacccgtcagggggcctttaatcacgcggaccttttcgccacgggccaaaggggcactgttcatgctgatcgattcttcagaataatcaagcatgaaacggaaacgggccatctgctcgtcaggaattacggcaggactactctcgccgcgcatcaccatgtaacggctcacagtagaaaaactcaggacttccatgcgttccctagggtcaacgtgtacgaagaccatcataggaagcaagacggaggtgaccagcttgcgacggtcgctccattggtggaactcctgttgaacgggaacgaaattctcgatacccatcttgtccagatgctcggaaaccttcttttcatgatgcatccgaaccaaagcaacataccagcgttttgagtgtgctacgccttcccctgtcccattaataggcccagc

SEQ ID NO: 4767 - DNA, 227 bp, Unknown
  gut microbiota DNA sequence
tcctgatatagagcacgaaccggattatctacccgatactccggtacatccaacatgatgttgtcaatagaaaattcatctgcaaaatacatataaagcccttgaccgtcagcgcccacccagattatatcctgaaaccggtctttcataagacaaaagataccggactgaacatttatggactggaggctatattttacctttgaatccggcatatactttaattg

SEQ ID NO: 4768 - DNA, 547 bp, Unknown
  gut microbiota DNA sequence
aagacatttataaatatttgttttggcaagaaattctagcagggaaaattgcaatgtatttgtaaaaatcaaaagcactcattgcatagcgatgagtgcttatagatactaacctacaattccctgtattcttctacgcaagggtaacacggacattcctttatcggatttaaatcatgatgtcctataatcaacgcttctggaaattttttctttagctcacggagcagagctaacagcgcccctcgttgctctagcgtacgtgtgtctttcgcttgtccttctgcattcagtcctccttcgtaacagattcctatggaatgtgcgttatgattccggcaatgtgctccgaccttctctagtggtcgtcccggatgtatttccccatcacgtgtgatgtagaaatgatacccgatgtcacggaatccccgatgtcggatatgatcctgtcggcaagcctccgccgagagggcttttccctccggcgtggcactgcaatgaatgataatcagtgtgatggtccgcataagtttacatacaactttgt

SEQ ID NO: 4769 - DNA, 432 bp, Unknown
  gut microbiota DNA sequence
cccggaacctcctccgggcgttgtcggtttctgatactccgcctgctgcttcaattggctgtcgagcttcagattggtcgttgataagtttccagtggcacgtgctttgagccgcatacctgtgatgttcttctccagcgagaactcttccagcgtttgggcagccttgctgcggattcctactccgaagatggctagatcatcaattttcacacttttgccgtcgagcagcagctccttgatgcagtccaccatatcagtgagcacgcctttgatcaccccactggaatacggtgaattgtgtttcgacatgtgttccgcaagtttggcaaggtcgaatgtctcgtcgcttaccgctcgggcgaaccatttgcccgcattcaagcctttcttctgttggttctgataaattttgtaacgaatcataaaata

SEQ ID NO: 4770 - DNA, 5082 bp, Unknown
  gut microbiota DNA sequence
aagcctgtggcaaagatgtcccctatagagttagtcagaatactggtataccttcaagtcgaacttcggcaccatcgccagcaaatggtcgaagatatccgactgaatccgctcgtactctttccacaccttattgcgggaaaagaaataaacctgaataggaactccgtacatggtagcctctttctgactgataatcaaatccaaatcctgattcaccaccggcagactgcaaagataccgctcgatatacacccggtaaacctgtgaattggtgggcaccactccttcctccggctgataatccgccatgagtggaatctctttccgataacggtcgagcatctccggcgtacaaaactggagtgtcgtcaggtccagtgtaatattcttcatcacccgccgcccaccggaatccttcatgccacgccagttctgaaaaggactgctgaccagcgtataaggcggaaccgtagaaatcgtattatcaaagttctgaatcttgaccgtgttaagcgtaatctcctgcaccgtaccatttgcggcaccggaaggaagcgtgatccagtctcccggacgcaccatatcattggcagaaagctgaatacctgccacaaatcccaaaatggaatccttgaataccagcatcaggatggctgccgaagcacctagtcccgcaaacagactagcaggcgatttatttacaaggatagagataatcacaatccccccgataaaaaacaaaagtacctgaagtacttgaatgaatcctttcatcggtcggttcttcattgtctcctttccatcgtaaatatccatgatcatcagcagaatcccattgatagccagcagcaaagaaaagatgatataaatggcacaagccttctgcgaaataaccagcagttccttgccacgcatgaaagccatcggcaacagggcatagacaaggatggcgggaatcgtatgaatcagattatgaaacactttacgtttcatcagcaatgtattccaaagatgcggtttcctgcgggtatactgcctcattcctcccactagaattgcctgacaaagatagtccacccctacagcaatggctatcatcagtatagcaataattgtttcatcaaaacgatcggcaaccttcgcatctatcccccaatctatcaggattttgttcatccattttcctaaatcgactactaacataagttctttctttatatatcatttatatagaaagataacagtgaaaacctacgtttggtttaaaaaaaagactggcgtccgatttactagaaatcaagaccgccagtcccactgctactctctaagcatttcttttatagtggcagaccgtagcgtccatctacaattttctccaactgtgctgccatcttctttaccagttccggattctgacccgccacattattcttttctttcggatctttcttcagatcgtaaagctgcggttccttactgtttcccaactcgatattcactgctttcagatatgccggtccatttcccggacggagatatttccatcttccgtctgtcaccgacaggttattctgtgcattctgaagtaccagccattcgcgtcccttcttttgcttgcctgtccacgctttcagcatcggttcactatccggtgccgcaccttccggcaagcggacattcagcatttcagcaaaagtagcaaaccagtctatctgacagagcaatgcatccgaaactgttcccggacggatcacaccctgccagctccagatacaaggaatacgtgtacccgcttcgaacgaactgtactttcctccgcgataaatgccgcccggagtatgatcgcctagcaattccactgcctgatccttatatccgtcgtccactaccggaccgttatcactggaaagaatcaccagtgtattcttatccaatcccagtcgttcgagtgcattcagaatctcgcctaccgaccagtcaaattcgagcagacaatcgccgcgaggtcccatgccgctctttcctgcgaactgtggagacggaacacggggaacatgcgcatcctgcgtggcaaaatacaggaagaaaggagcagacttgtgtccttcaataaaggaaacagcttttcctgtcagcgtctccgcaatcttctcatcctgccagagagccgactttccgcccttcatatatccgatacgggaaataccgttcacgatactctggtcgtgtccgtgagaaggatgcattttcagcaactccggattgtccttcccggtaggttctcccggaaagttcgctttgtaacttacctgaatcggatcattcggatcaaggttgatcacctgatcattctctacaaatacacaaggaacacggtcgcccgtagctgccatgataaaggaatattcgaagccgatatcattcgttcccggctgcaaaggcttgttccagtcttgttctccgcccttgtcgcccagtcccagatgccatttgcctacgactccggtgttgtatccggcatccttgaacaggttcgccatcgtatagcgttccggacggataatagccgcagcgtctccggcagcaatacctgttccggctttgcgccatgcatattcgccggtcagcatcgcatagcgggaaggcgtactggtagcagctgcactgtgcgcattggtaaaacgtactcccattttggcaagacgttccacattaggagtatgaatagtcttggctccgttacaactcaaatcgccgtaaccgatatcatccgcatagataaaaacaacattcggacgctgggtttgtttctcctgagcagtggcctgagaagccagacaggaagttaacgctaaaggtaatataccataaaattcttttctcattttgtcttttgataattattaggttagaatgaataagtatctattctcaaagtgatgtacttattaagttaaaattcaaagcttcgtcaaggagctacggtcactccgatttcattcatttctacttgcgccgttgtagccgtaggggtggtagcttccagcttgataaagcgtgccttttccttctgaccgaaagtgacagtctgcggcaacggattatgcatgatattgctgaactcaccgttggcaggcacttccttccagttcttgccatctgcgctcacgtagaatttgtaacggaaagccatcgtcggtttcgcttccgctttcagaggcgcataagtaaatgcggagatttcgacctctttgcccagatcaatggtcaacggagaagcagccacctgtttccatgaagcacgaggcagattgttccagttttccgtccggttctcttcttccaaagggtctgcatagtaggctgccacctgactgatgtgagccgtcagacgacattcgttgatcttcacccgaagctgggtagcctttactgccggaaaacgaaccatacgcttatagcctacagtcgttcctttcgccacttcctgccagccttgttccgtcaatgcctctacggtaaaagactccacccgttgccctttcgtgatatcttcctgcaacatcacaacgttgatttccgactccggtttcaaggaataaacagtttcactgccggaaacagcctcccagtcttttcttcctttctctacccggttgttcgtaaatatcttctcccgataagcagcaaattcgttcaaccgctgcacatccgcttcattaatcaatcctctgcggtcgggaggaatattcagcaagagcaccgagttatagcctaccgattggaaatagatatcagccagatgttttaaggatttcactttgctgtcttcttccgcatgataaaaccatcccggacggatagacacgtctacttccgaaggataccagaataactccgttgccttttccagcatcgcacggcttcctaaatcttcggctttgctaaagacgcccagtcgtttgttgttttcttcggaacgagcataaatgcccggagtcagcaccgttgcactccattccgtttcgcgtcccaatcctttttcattacctacccaacggacatcatcgcccataattgccatcaccgctttcggctgcaactgttggatagtcttgtagaacgcatcccagtcatagatttgtttctttccgttcggtccttctccgtttgcgccgtcaaaccacacttcgtgcacttcgccgtaattagtaagtaattccgttaattgccgaataaagaattcgttgtatttaggagaatctccgtagcattccgcattccggtcccacggagagaggtagactccgaatttcatatcatatttatcgcaagcgttacgcagttctttcactacgtcgccctgaccgtttttccaaggggaagaggctaccgaatgtttcgtggtagctgtaggccacagacaaaagccgtcatgatgctttgccgtgagaagtaccattttaaatccggcgtctttcaaggtgcgcacccattgttctgcatccagctctgtagggttaaagatagcagggtcttcctgaccatcgccccattcgcgtccggtgaatgtgttgataccgaaatgcaggaaagcagtcagctccatttgttgccacgcagcctgctggggggtaggaaccagccttgctgccatatcgattttttgttcgagggttgcatcctgtggaaattcaacatgcttcacatagtagttttctttcgtcagtccacatccgcccaacgttatcacagaagataaaaagagagaagtaagtagtttgttcatcataataaatattgatttaatgctaatgagacaaagataaatataaaggagcaaatttcatggctttcccgaagcgcttttcattaaacttcgctaaatccatgccattcgctcccctatattctatctcaatgcaatatttctatccaaatgcaatcagtttcaggctattttaccggataaagcgtaaattcaaaactctgctttttcaccggtaccagatattgcggcaatacacccggtccgcaggtagccgtacctactcctgcctgttcggcatccagatgtat

SEQ ID NO: 4771 - DNA, 4547 bp, Unknown
  gut microbiota DNA sequence
tcattccgtcacgctccagttcattaatgtggtgcgccttctctaataatacatccgagaaaggaatgatactaaactggaaaggacgattcgattccataaagacaccttcgcctgcctgatccgtcagtttcgcccagcgtacatctgtccggttagctgtagattgtggggtagcgtaatagtggaacatccgttctaccgtcgtatcatacagtcctatcctaccggactggttgcggtcgatatacgtttcatgatcgccacgtcccagataagatacttgattataagcatctgccatgcggaaggtcagccccagacgagccatcgacttcacaatcgccgtatccggctggaaggtggtacgaaccttcaatgccccgttcttgtcgagtgcataaacaaaatccgccattcctactttctgtcctttcccattaagaatctcagcacggaccgttgccgatgtcttttcttctttcagtgataccactttctgtgtcaggttattcaaaccggccttgcgccacagacgggctccgttcctatcccggttatcattatccgtagccggacggaacaggctcaaagtgattggtgcagccagcaattcctttccatccaaagtcagggaagaaagtgccccggtattcttgtccacaacaaaagctgtttctcccgccttctgcggacgataagccgtcgtattcttattaccggcaagtacaaactggtcgtatgccacttcccagtcggtatccactagcggagtggcctctttacggctccagcttaggttcagataggcttcccgaacggtattcggaagtttgacggcacccaaagtgacatctaccgtagcgtgcggctcgcagtctacttccttcgtgccttcggcaagtacggttccatcctcccctttcacattccaacgcaggatatattcattcagattagaaaagtcataccagttctttatgcagactttcagattcttccggtctgacaaagtcgctttgatgttctgatatattttcttcacttcgagtagatgcggatgcggttcacgaacagcattcaccagaccgttgccacagaaattaccgaagctggggattccttccggtccgtaatcgcctccataagtccagtaccattttccgtctttgtctatttcacggaagttctgatccacccagtcccaaatgcagccaccttgtgccatcggttcattttcaaagacatcccagtattctttcattccaccgcaactattgcccattgcgtgcagatattcgcagagtatgaaaggacggtaaatatccttcttacccacgtatgccttaatttcgtccacactgcggtacatacggcagtagatgtccgtgttgtaattcagttcggcacgttcatattgcacgggacggcctttctctaccgatttcagccagtcgtaagtacgttcgaagttgataccgttgccggcttcattgcccagtgaccagatcacgatagccggatgattcttggaacgttcgtacatacggtgtgtacggtccatgtgagcggtcagccaagtactgtctttggcaagggaggcaggcccgtatcccatgccatgcgattcgatattcgcctcatcaatcatatacagcccgtagcggtcgcaaagctgataccagtacggatgagtcggataatgtgagttacgcaccatgttgatattatgctgtttcatcaggcggatatcctgttccatcagttctttgcttacggtacgtcccagttgcgaatgttcgtgacggttcgtccctttcaccagcaccggaacaccgttaatacagaaacatccgtccttgatttccgaagtacggaaaccgacttcacaaccggtcagttcggttacttttccttgcgcatcttttaattcgagtaccaaggtataaaggttaggatgctccgcattccatgcttttacttctgcaatcttcttctcatcgaaagcgataaagttactcagtccacgggacttgatgttaatggcatcctgcaatactgcctttccggaagcatccttcagtgtataagcgatggagctggcagtagcagaagggccttccaccgtcacttccagattgaagataccttctttgtatttctctttatcaagggaagcacttactttatagtcagcaatatactgtttgggagtgctatacagataaacatcccgttcgatgccactcagacgccacatatcctgacactccagataagcacccgaactccagcgatatacttccagagctaccacattctctccttcactcagtacatcggtaatgtcccattcggcagccgtcttcgatccctgattatagccaagcaactttccgttcacccatacataatagaaagagatcactccttcgcagcaaagcactacccgacgtcctttccagtcggcaggcaccttaaacgtgcgacgataggaacctacttcattctcagcagatggaaccaatggcggattcttcttgaagttgaacatcttgtcgtcaaactcataagtttcgttgacatagatagctgttccgtagccttgccgttcccagttgccgggaacattaatatccgcccaccctccggtataataagagggctggtaaaagtccttcggacggttgtccgggttcttcacccagttaaatttccacttcccgttcagactcatataataaggagactgttcatatcctcccggcttttcaatatcggaagcgtcggcgtaaggccatacataggtatgaggagcgagtttattcagtcctaccgcatactggctctgccactccggcaaaggctgtttctgagccgaagcgaaggtagcagtcagtgctgccatcaagattaaaaacgttcgtttctttaatttcatcattattatattgttttttggtgactggttattcaatgatcagttcatcgaaacatactcttgattcttgtccgggacgtacatgatttgtcggacattctcccgctccttccgttgtcacccgcacataacgggcaacggttcctctcatatctatcgacaggtcttcgatgaaagttccttcacggaatatctcttcgggagtatattccaattcgttgatatcccgataagtcgcattatcgtccgacacggctacccggattgatttcggtttgtgcactcccattccatagttagtgatacaaccgattgtcagcgtattcattttctccttttgcaacagatcgacggtgaaggaaatacggtcgctacttccccaactacaccattcaaagtccgtttgcttcagacttcctctgactccgttgttcaggacagcttcattcactttattacccagcaacggttttgccgtagccttgttccagtgtaccggaagcgtcagtcttttccccatctgctgtccatcggcaaacgttgcggcattgactgtttgagcttcttttaccaacaatggttgttcatagagcggtgaagcggcggtcggctcgcttccatccattgtataacggatttccacatccggacggacacattccagttttactttcagtgctccgtcttccggtctcacggtatgctgtatgttgtacatcgaacgggcatacactatccctttggctgcgagatgttcattaaacgaatccatgcctttcaggaacgaagtccagtctttcttttccggttgtgtccatgccacttccgccaatgccgccaggcgtgggaataccagataatccacatcctccggcttattacagaactctgtccacatacaagcctgtacgcccatcagcaaatccgcatattccggtttccagtctttctgaaccggctcatagtcatacacatctttcagcgtattattgccgaaatacgtcagcggctcaaaccactgcggtccttgataacgaatcaggtacatgatgcgtgcgggagtcatgatgaagcgatgtcccttctcggcagccttcagtgcagcctgtccgtatccctgccaacccagaataatggcatcgtccggcaaaaagctactgttcgtcagctcatcccagcctatcacctcgcgccctttgctacgtacatattcgctcatccgattcatgaaataaccttgcaaatcctcttcattggcaatcttctcctttttcatccgtgcctgacacagcgggcatttctcccaataagttttacgggcttcatcgccaccgatatggatatatcgggaagggaacaattccagaatctcatccatcacatcctgaagaaaggcatagacactgtcatttccggcacaatagatgatctcggaatttcgtcctcccaaaccggggagcactccgatatattccttcactaccggacaagctaaatgaggataagctgccaatgccgaattactgtgtgccggcatatcgatttccggtaccacttcaatctgacgttcagccgcataagccaccatttcctttatttcttcctg

SEQ ID NO: 4772 - DNA, 9996 bp, Unknown
  gut microbiota DNA sequence
agatgaaagtgaagcgtgtttattttgagcattgccatacaatcgataatgcgcaatacattctctttgggaataaagaagcgtgacgcatccagcaataacgcacggtaaccaaaacgcggttcgtcctgaatactcactgccggaatactccattttacttttttatccgacacttcctctttttcgatggatgccggaagtaactggcgaatggtctgcaaagcataaaagaatccttttgcatccgatgcttcgataatgatttctttcggagacacttgcagcgtatatgcctcacttttcaaggttgcatccgtctggaaacgaacatttcccttttccgcatcgcctaccgtcaacttcggagtaaagcctgccgcacgggtaaacaaagctataaagctgcgtgccacttccgcctgctcctcgttctctacggcaaataccgttttaccggagaaaaggtagttcccgctgcccggcactatttgcgccgggcgtggaaccaagggtatgtcatgtgtcaagttagtatcgctacatccggctactatcgaagatagaaagcctatcagtaatattaaaatcgttcttgtcattgtattattcgggggttattccttgtccctttccggagaaaagcggacgggatcattatattgttcctgtagtttcagcaattcgtctttcagttcctttactaccggttcatactcagcctcaccgtagaggttgtgcatttccgacgggtctgcctgcatatcatacagttcccaccagttgatatcattatagaaatgaatcagtttatagcgttccgtacgtacgccatagtgacgtttcaccatgtgttcggcaggatattcatagaagtggtaatacagagactttctccagtccttcggatgctcacccttcaacagaggcagcagtgatactccgtggatatctgcgggaatttccgctcctgccagttcaaggaaagtaggtgcatagtcgatgttctgtaccatttcggtaatatctcccctgcggtcgaaacctttcggcagacgcatgataagtggtgtgcgcatagattcttcatacatgaaacgcttgtcgaaccaaccgtgttcgcccatgtagaaaccctgatcggaagtataaactaccagtgtattgtccagcaaccctttttccttcagatagtcgagcacacgtcctacgttatcatcaagagacttcacggttttcatgtagtcgcgcatataacgctggaacttccagttggccagttcttttcctgtcagattctgtttgtagaaatcatcgataatcggagcatagaacttgtcccatgcggcacgctgtccttcgtccatgcgtccgaggaatctttcataaagtgatctcaggcgtgatttctcattcggacgaagcatcttcaggtcgtaaatcatatccatgtccttcacgatactcatttcctgagcagccgcagcagggcgaccttcatagtcgtcaaagaaattatccggcaacgggaatgtcttgtcctcgtagagggcaaggttacatgtatccgccatccagttacggtgaatcgccttgtgatgaatcagcaggcagaacggtttctccggatctcgcttgttttccatccagtcgatagcatcatcggtaatcagattcgtgatatatccgtgtttctggatggtatcattatcttgtgtaataaaggcaggattatagtaatccccctgtccgggtactatctgccagtaattaaatccggatggcaaactttccagatgccatttgccgaccagcgcagtctgataacctaccttttgcagcagcttcgggaatgtctgttgagaactgtcgaatacgcaagtcgtattatcgtagaatttattggcacagctatgcttacccgtaatcatacaggcacggctgggaccgcttaatgaattggcaacgaagctttgagtaaaacgtacaccatccaccgcaatgcggtcaagattcggagtttccatgtagcgggtgtcatagcagctcatcatctgggctgtatggtcgtctgtcataatatagacgatgttcagcggcttttgttctgtcgttttctgcttgtttgtacaagatgcaagggaggcaacggcggctactcctgccaaagaatagaacaagtttgattgcaggttttccataatgattaatttatttagattacatggcaaagatagggaagatatgtaaaaagtatgtctacaaatagctaatgtatttacaatattctctatttccacccgaattagcagtaaatgccggaagtaaatcgctgttgcacgatggccttccggcattgaacttatttcatactattgaaaacggttcgtcatattttaatagtaggtatgcgcattaggattgtgcagattaataccggcaggcttactataattatcgtttgagtaaaatctgatccaatcgatttccatacgaggtgactcctgactcgttttactagcctcataactgatagaagcaaatcccgaatcccaaccgaccggaggaatatcgttatatcccaatccccacgcacttggagcacctaacgtcagcaaataatggaagcctaaaggattcttttccagattgaacggccattcgccggaagcactacccaaatccgcagatgtgattactttggttgttttaccgttaatacccattttgattgtatgatcatcaacaatttccacccaataaatattccattgatccattttgctgatagcattctgagtcgtcggatttttataagtaccggttgcctgattacccatatgcactgtttgatgagcattattctgtcctgtaatatttcccaccggattttccatcacatcaatctcaccatatcgcggccatgcgctatatggatccgacgcctgactttgtgtatttccctgcagccagatagcggcattaaacccattcttattaccacggatacgagcacgagtctcgattcgggttcccactcctatccaggtatgttgcggagcatatccttgattcatattaaatttaccggagaaacaagcagagaatccataatctttttgtccggcccctcctcctgtagcattaattttctctttcactgcccacattttcaagtaaccttcatctgttacatctgtataccgatcattattaacggccatatatttctgtaccatcgctgtattctgagccccaaatcctagtacaggacatactccgttagcatttttagccgtacggcattgaccattgattgcatggaattccattgaattcacaaacttccacccttcagcggccagcgcttcattgggatgaggggttcctgccttcatagccagggcctttttatctccccaccatgttttaaaggcttttgcattcttctccgaatagaatggttcatcaggtgatgtatacacgtaacgttcatcttccagctccgaaccaagaggagtatcaatatcctgtttcgtaatctccatcttctctgccaacaaaggatgatgctcggaatcggttgcaaatgttaaagtcagtttggtatctccaaaaggataaccatctgtcagcattgttactggatcactatctactgagagttcccctgcagaaatagtcagagtagacggaaggttttcataaaggtcggcctcacctgctcccggagtaatagtaactactatatcttctttagcaggtacatctactttcatttgcagaataaatgtatccccctctttcaccaccaagtccgagttacctttgatagaaactgctgtgcgataataatcagaaaccttaatagcctgttcagatccatccatcttatacccacgggcaaaagctgtgagcttcattaagacagattccgtaatacctgaagattttaccgggacagaaacttccaatgttttctctccttccgggaaagttaccatttccggaaagttattgaataaagtttttgatacatccgtggaaccatcagttgccgtcagataaatatcaaattcttcattggtagctatccctgctccctgttcgtcttttacactgaaagtcatagtcagtgtttcgcccattaccagtgtgttactctccaatgccagcgtcaatggcactggtttgggaagcggagctacctgatcgtcgtctttacacccggtcagagctatagcccatattcccaagggtaaacatgcatatagtatatttcttatcttcattgttttatactttaatatgtcctactattattacttcgtttttgtccatcccgggttttgtttcaactgcttattcagttccagttcatccggcggtataggcaataaataatcacggtccggctggaattgatatccttgtggcaaataatctttcaacggatccatccaaccactatcattggtagaaaccagtcccaacgattcttgtgctttgggtgagaaactcttataaagaactccatcagttcccagataagctcccaagcctcgttgcccttttatcagcttatgaccggcccaacgcatcaggtcatcctgacgaaagccctggaaagccagttcggcacgtctttcccgacggatttcctgcataacaggagtcagagagtaaccaaaggaagtaaagttaggatcaatctgagtaggacgtatataagtaacacccgcacgttcacgcaaaggttttaatgtcttattcaagacatcatcgttacaaagattcaattcttccgcagcttccgcataagctagtagcgcctccgaatagcgaaataatataattgccatatggctgcctccttctacaaacgtagtgtcaatacccaagcgaatatgaaatccggtaatattcttaccgttaccgtctccattcagattaggagaagaaatatccttattcttctcttttatttcctcgtctgttcctgtattatcataggctctcacattcatcggtttagagcctttcgctgtagaacggaacttcgctcctgtattcatgaccgactgaatcaaacgaggatcacgtttttcaaaagtcgcattaaagtccttatacttctcatcattcggattgataaacgtaccatccgcattcagataattatcaaccagcgattttgatacacctgccgggccatcgttatctacaactccgccaccaagcaatccacctaaaccgtggaacacaccatcgccggcatatttcttccagaatacagcttccgtaatcttagaaagatcatccttattgaacaaatgagcaaatgcatcacctggatttacagcttcattatccgtagcatccgtattcaggctcaaccctgctttgaaaagttcgtctccccatttcattacttccttaaagaagtagtctgagttatcagtttcagaaaattccgtccctttatgatacttttcccaggacccttcatacaaagctacccgcattgccaatatcatggctgcttctttgctgatacgcaagccactgtatttacttcgcgactgaagcattccttctgaagctgtcttcaaatcttccaatataaatttcgccacatccgaacgtgatgcaggaggaatctgcaaaccagctactgttgcattctcatcccacaaccggtccatcaaagggatatccccaaaacgagtcaacaagtaaaaatgccagtacgcacgcaggaaatatgcttcccctttcaaagaaagaacatcttctgtttcctcattctccggaacacaataataataaaagaagtaatttacattacgcaaattctgatatcccttctgccattcagacgaaccactgaaagcattgtattctccattcagacgcaggtcatacttttcggcaagaatattgtcactgttcttttcttcacctctcactcccataccatattgagaaggagcaggaagcgccatatacaagccgttaatgtaattttccacctgagcacggctacataagtattcttcattattaggttccgtcaatggttttctgtccaggaagtccgaacaagcagacaacattaccccaatgaaggctgttaacaatatatatttctttttcatgtcttttcctctctaattaaaatgtaaaatcaagtccaaatacaaagttccggttcatcggatacactttaccgttaccattttctttagccggagaagtcagtcccggtgcagattcattgctaccgcctgcccaggtattcacctgattcaaggtttcaggatcaaactgcttgggcaactttgttatcgtaaataagttgtcacacgtgaaatatacttttagattttccagccctatgttacgaagcattctcttattaaaagtataagataccatcagattcttcatacgcatataagccgcattcaccaaatatcgggaagtattataagcagagttggcctgaaaatccggtttattgaactcagtaagtctaggcagataaccattcggttgatcagcactaaaataatcaagatgttctttaaagaagttctttcctccgaaaaggtaagtacttccagccagcgggaaatctcttttggcaaccccctggaacaaggtggacacttcaaatcctttataacccacattcaaattaataccgaaagaatatttaggagttgcattaccaataacccgcaagtcaccatgatcgcttaatgttcctttacccggatctactttaccatcgccatctacatcaagatatttcaaatcaccgcgttgccactggctatccggtttgaagaaactaagatccactgttctcagataatcatcaatttcgcggttgctcataaataagtcatcagcacgatatccccagatttcaccaatatccataccttcataatatcctttgtttgatggcaacccagtatggttattaaagatgagtccttccggattgttatatttggtaacaacagctttgtaattgaatagattaaaacctacaccatagctgaaaccacacttcaactggtcatgccaattgacagaaagctcccaaccacgatttcgtaaagttgcattgtttactttggcacgatcagcatttgcaatacccccgatagatggaatagcctctgccggtccgatcatatcacgtgtggtacgctgatagatatccgccgtgatagaaagacggttatccagcaacatcaaatcgaaacctaagttggcattatccaccttttcccaagtaatataaggactgaccattttcggagttttggctatcgtaccttgagtaggtgtagaactgatacccggaagcaaccaggcattagggtcagccgccacaagtggcatcactccgatatagtcataatatccggctccgttctgattgcccagacgaccataagagacacgtactttcaactgagagaatggtaattccaatttttggaagtaatcggtacgtgcaatatcataaccagcagagaaagaagggaaaaatccccaacgatgtcccggagcaaaacgagaagaaccgtcatagcgcccactaacctcaaggaaatacacattctgataattccaattcatacgggcataagcacccattgtagcccaatgtgtacgattatcaccggcataaagagttccattagcattggcaaatgaaaatatatcatcacttaacattccatctttataggtatatccatcagaattttcctgcacttccatctggaaacctgccattgccttgaaaaaatgttctccccattgatgcgtataagaagaagatacattcggagaaagataataattgaaggcatccccgcgggtatatgaaccccatgtagagtttttccagtgcattcccggatattgatatccctgcgtattcccagtaacggtgtacaattgtttattggggttttcataaataggagttccccgttcgaagctgttcttctccacatccagacggactttcatttcaccgacaatatcccatccctccaatggagtaataacagcagaaaaagacatagcatccgaaatacgattctgattgtaacgggattgcttcatacgcaagaattcattccaatccggaagattatattccgaatcaacaggaagaactgtcggacgattaggaaaagcattacctactgtaccataaaaaatagtctgattagccaacggacgcttgattatgttcagagtcatattattattgaaattgaatttcaaccattcattcgctgttatctgaaatttagtatttatattatatttactcaaattatcctctacctgatccagcaaaccttcctgataggtatatcccataccaacgtaatagttgaatttatccgaacctcctgttatattcaggttatgagaatggcggatagcagacttcttaaaataataatcaaaccaatcagtattggcatataccgcatcctgagaaccggcccatcctgttccctgctgattaggttctacacccggaaattctgctgaataaggattagccataaaacctttcatcttctcgatcagctgatcagaaaaaagacgcttcacccccatgttatcattacgttcatttacataatgagcaaactccagggagttcatcatttcaggcatattaataggagaactgaagccgactgttccacggtaagtaatacgtgtcttttccttcttaccgcttttcgttgtcaccaataccacaccataagctgcacgagcaccgtaaacagcagacgcagaagcatccttcagtacactgatactggcaatatcggcaggattcacattctgcatactctgttctacaccgtccaccagtacataaggttcaccaccattaatagaaccgataccacgaatattaaatttaatctctgctcccgtttcaccaccgacaccactcgccgtagcatcagaagcgaaattcaaacctgccacattaccttgtagcgcactggtcaaatcggttacaggacggttaacaatagctttctcattgacagtagctacagcagccgtaatggtattacgtttttgcttatccatacctactacaacgacttcatcaagtacttttgaatcttctttcagcacaaaacgattaccttccagttttgtcacctttacttcgagcggagaaaaaccgacataagagatagtcaatgtgtttccaacttttccttttatagagaaattcccgtcaatgtcggttatagcaccttcttgcgttcctttcaacatgaccgtggctccgataactgtgtcgcctttatcatccaccacttgtcctttaatcatttgttgctgcgcaaacgctcctgaaggaaataaaaggaggagcatcagaagaacaacaaagtagctttgttttttcataagcttcttttttttcataatactacaatttaataattaaagatactaatttattagctaacaaaaataaatcccaatacaattaagattcgaaagttctcaccaactcatttaaataggtaggactttcggcaacaaaaataggcacaagcccgaaaagcgatgttctaaattcactatttcgcctccaattttgtctaaaatagtccatttcaccgcatttttcatggtgacagacattatcagacaacttttgagacaaaagaagaaaggcggtaatattcatttccgaatatctccgcctttcttctttgtaaattatatacctaaatatattggctatcgttttgaattaaattttctttacttcatcaactgtcaatccggaagatttaacgatcacctctacagggattcctgcctttttcaaattacgggcaatctggatccgggcctctctttctccttctgcacgaccttcggcacgttctgtgaaaatgttatctctca

SEQ ID NO: 4773 - DNA, 12050 bp, Unknown
  gut microbiota DNA sequence
aaatcacaatattatccaaatgccggtaatacgcattcaattcttccttcgtcatccggtcaagtttcagcctttggcgggcttcattcagtccaggagctgtagcagtatccggaatatctcctgtattcaaataataaatccattcttcaagaggacttttggctacctggttaaaatcattcaccttcaatatatagtactccggatataactggcttacgctatccactttgaaggtctgtttttgaaaaggagtcagttccagaatatccccttgatggatgccacgaaactccgttttaccatgataaacaagatccttgccgcagcctaaagagaaatatacgatattgacactgtatactttacggacttggtcatacccttctccacgattgatatattcggttactaacttagaagctccgaaaagcatacgttgaaaataggcgtattcattattattctgaacttcaatcaaaatcagttcacctttagaattctcagcaagcatatccacacggttatacttatcgaactcatcttcctgattactttcactttccaataacttctgaatcaagattgtttcacccagaagagtagtcaaaaggccttcgagtacggcgaaattggctttattacgcaaaaggcgtttcatcgcccaatcgaaacgaatataattacttggcataggttcgtctcctttctctgtttctattttcataataacaaaggtacacgaaatatgttagattccaaagcaatatgtttatattcacaagcgtttcttttctatcatcctaatcttttcacaaactcttccgcccgtgccaacgtctccggcttgccgatatcaatcagttccagcttttccgtaagataaccgcaataatccgtttgcccgcaggtagccagataaaagtccataatagagaacttgccttcccagcacggcacttccatcaactggaagacagcaggcgaaaaaacatggataccgctaaaggcatactctctatacagcgactcatcatataggaaaccttcgggcctcacctgtcccgtatctttgttgatccatccgcacaatctttgttccgcatcaaaaagcagataacgggaagttttacgccggctggcgagcaaggtggctacacttccgttccgcaaatgaaagtcatacagttctttcagattcatatccgaaagaatatccacattatgcacaaggaagggttcatcggaattttcaaagaatcgacgggcttttctgattcctccccccgtatcgagcagcaggtcccgttcgtcggaaatatgcaacgtcagtccgaaatcattgttagctttcagaaaatcaataatctgctcaccgaaatgatggatattaatcactatttcggtaaaaccggaagctttcagtttcaaaatcacatgctccagcatcggacgtccggccacgggaacaagggctttgggcatcgtatcggtcagtggtttcagccggctgcccaacccggctgcaaatatcattgctttcattacacagttgcctcaaaagtacgctctatattctgttcgcggtgcaccagctccactttcacgccaaatttgcggttcaggtgctctgccagatgctgcgccgaataaaccgaacgatgttgccctccggtacagccgaagcaaacggacaaattactgaagccacgttccatatatcgcttcaccgaagcatctaccaacgcatagacagagtcgaggaaacggagaatttcaccatcttcttcgagaaaactgatcaccggttcgtccagtcccgtgaaaggtttgtagcgttcgtacttaccgggattgttcacggcacggcagtcaaagacataaccgccgccattaccggtaggatcatcgggaatccctttcttataagcaaaactcatcactttgacggtaagctgccgtttcttgagatcgtcggtgaattgcttgagttcggtaagttcgcgtaacacattgcaaagatacgggtattcagggtacgcctctttgagcaagtcacgcaggttctggatagcaaaaggaacactctggataaaatgaggtttcttctcaaaataccccctgaaaccgtaagctccgagcacttgcaacgtgcggaaaagaacaaaatgacgaagctgactatagaaatagggctcgtcgataggctgatatttgcgcagggcatcgatatactccttcagcaattcctgacggagactatcgggatacttcgcctttgcctgccacaggaaagaagcgacatcataatagaacggcccttttcgtccgccctgaaagtcgataaaccacggctcaccgtctttgatcatcacattgcggctctgaaaatcgcggtacataaaagtagcggaagaactgcgcagcagcacatcactcatcttctgaaagtcgtcctccagtttatcttcctgaaattccatgccggtagccttaaggaaacaatatttgaagtaattcaaatcccaaaggatagaacgctgattgaactccggctgcggatagcaacgggaaaagtcgaagccgtcggctccggcaaactgtatggcaggaagcaaacggaccgtcttgcggagcaactctttttcctcttcggaaaatacgctggtagcacgtcctttctcgattgcatgaaacaaaagggtatctcccaaatcctcctgaagatagtaactcttattttcggaaacgatatgaacttcgggtacaggcaggccggacttgcggaaatgggctgccatataaaggaaagcatcattctcctcgacagacgtgccacatacgccgatcagggttttcgcacctgtcagccggaagtagcggcggttggaaccggaagatggtaattctgttatattctctgcgggaactcccgtatattcctgatatagtttctgtagttcttcggtaatcatagtcgtacattttcgagcaaagataaagattatagataaattaatatcatctttgctcaaaactctatatcattttattcaatattcatccgaatgtattatctttgcttctgtttactcgacctaattcaatgaaagcaagactctatatcgtcctatgcatcgcatttatcacacaaatggccggtgtccttcctttacaggcggggcattactattacaagcagatttctctgaaagaaggactaccttccaccgtccggtgtatccttacggatgaacagggattcgtgtggataggcacccgctccggtctgggacggtttgacggccacgaactgaagaaatacatccatcacgcagacgatccgcattcgctgcctcacgacctcgtccttcagattgcagaagacgaacaatacaatatctggatcttgactgataaaggggtggcacgctaccaacggcaaagtgacgacttctacctgccaaccgacgaaaaaggaaagaacatcaccgcatattccacctgccctaccccagaggggttattattcggagccaaaaacaaaatttacttttacagctaccgggacggttctttccgcctgctgcaggaattcgaccagacaccggatttcagaaacttcaatatcacgatactcagcctttgggatgaagaaactgtactctgttgcagccgctggcaagggctgctcctgctcaacctgaaaaccggagcatacagccgcccgcctttcgactgcggaaaggagattatgagcatgatcatcgactcgaagaaccggatatggattgccccctacaataacgggctctactgtttcgaccggaacggaaaacaactggcatcatacaccacccgcaactcctcgctgagcaacaatgtcatactcagccttgccgaacgggagaacaaactatggatcggaacggacggaggcggtatcaacatcctcgaaccggaaaccggacagctttccctgctggaacacatccccggcagagacaactattcgctccccgccaactccatcctcagcctctacaacgaccgtaacaacaatatatgggcaggaagtatccggaacggactgatcagcatccgcgaagtgtcaatggtgacctacacggacgtagtgcccggcaacgaccgtggactgagcaacaacaccatcctcagcctctatcagcagtccgacgataaaatatggatcggaacagacggaggcggagtcaaccttttcaatcctctcacggagaagttcacccattatctctctacgtgggaagacaaagtggcatctatctgtcagttcactcccgacaaactactgatctcgctcttctcacagggagtgttcgtcttcaatccgtctaccggagagaaacaaccgttcacaatcattgacgacgaaacgaccacccgcctctgcaatcggggaaaagcggtcaacctgtatcaaaacagccccgacaacgtgctgctgctcggcgaccacgtctatcaatacgacctgaacaaacgcactttccggattgccaccgaacaggagggacaggacatcatcggcgctcttctgcccatcaccaatcacgaagactatacctatctcaacgatacgaaacgtatctaccaactggacaaacggaacaaccgcctgacgtctctgttccgttgcttcaacgatacggtcatcaattccgttgcgcgtgacgaatacggagacttctggatagggagcaactacggactgatccactataatcccgctaccaaagtacgtactccctttaccaccacgctattcacggaagtaacgctcatcgtgtgcgatcaacagggaaaagtatggttcggaacgaatgacatgcttttcgcatggctcatcaaagaaaagaaattcgtactgttcggcgaatcggatggtgccattcaaaacgaatatctttccaaaccccgtctgctgagcagccacggagatgtctacatgggcggcgtcaaaggactgctgcatatcaacagcaatctgccgccggctacttccgagctgcccaaactgcaattatcggatgtcatcgtcaacggagaatccgtcaacaatgaactgtgcggtgacccgaccggaatttccgttccctggaacagtaatataagtatccgtatcatgtccaaagaagaggatatcttccggcagaaagtgtatcggtatcagatagaagggctgaacgaccagcagatcgaatcgtacaacccggaactggtcatccgctcgcttccgcccggtgattatcagattatggcttcctgcacagcaaaggacggcagctggattcccagtcagcagatactggaactgaccgtactccctccctggtaccgcacatggtggttcacgctgggctgtgccttgttagtaaccggaatgattgtcgaaactttccggagaacactgaaacgaaaagaagataagttgaaatgggccatgaaggagcacgagcaacaggtgtacgaagaaaaagtacgtttcctgatcaatatcagccacgaactgcgtactccactgacactgatccacgctccgctcagccgcatattgaagtccttatccccggcagatacccaatacctgccgctgaaagcgatttaccggcagtctcagcgaatgaagaatctgatcaacatggtgctcgatgtgcgcaagatggaagtgggagaaagcaaactgctcatacagcctcacccgctcaacgaatggatcgaacatgtatcgcaagatttcgtcagcgaaggggaagcaaagaatatacagattcattaccggctcgatccacgcatcaaaatagtgagtttcgataaggacaaatgtgaaatcattctgagtaatctgctgatcaatgcactgaaacacagcccgcaagacacggaaatcaccatcacttcggaactgcttcccgaagaaaaaagagtacgcatctccattaccgaccaaggttgcggattgcagcaggtagacacacagaagctcttcacccgtttttatcagggcatgggcgaacagagcggaacgggcatcggcttgtcttactccaagattctagtggaactgcacggcggctccatcggcgcacgagacaattcggaatcgggagctaccttcttcttcgaactaccgctgaaactggaatcggaagagatcatctgccagcccaaagcatatctgaatgaattgatgagcgacgacagcggcaagcagtcacaagaggaagacaacttcgccaccgctccctacagcattctggtggtagacgacaatcccgacctgacggacttcttaaagaaagcactgggagaatacttcaaacgtatattgactgcctctgatggcgtagaggcacttcagcttatcaaaagccatactcccgacatcatcgtaagtgacgtcatgatgccccgcatgaacggatacgagctttgcaaaaacataaaggaagacattgcgatcagtcacatccccgttattctgctgacggcaagagacgacaaacaaagtcagatgagcggctacaaaaacggtgcggacgcctatctgaccaaaccgttcgaagtggaaatgctgatggaactgatccgtaaccgactaaaaaaccgtgaacataccaagaagagatatctgaacgcaggactgatccccgctccggaagaaagcaccttcagccaggcagatgaaacgttcctgctcaaactaaacaagatcattcaagagaatctggacagtagccgattggatattccttttatatgcaaagaaatcggcatgagccgggcctctctttacaacaagctgaaggcactgacggacatgggagccaatgactatatcaataagttccggatggagcaggcaattctactgatcaccggcacggaaatgtcatttacggaaattgcggagaaagtgggattcactacttcccgttatttcagcacgactttcaagcagtacacgggcgaaacaccgactcaatataaagagaaacataagagagagacatcaaaaacaattaatcaataaaacccctaatatacaaatttcttaacacattatttttatgaactacaaattattttctttagtaagcggtacgcttattctttccagtctgtctgccagcggacagaaaaacaacacaaagccgaatatcctcttcatcctctgcgatgacatgggatatggcgatctgggatgctacggtcagccattcatccgcaccccccatctggatgcgatggcaagcgagggtatgcgcttcacacaggcatacgcaggaagtcccgtcagtgctccttcccgagcttcatttatgacagggcagcatacaggacattgcgaagtacggggcaacaaggaatattggacgaacgcccccacagtaatgtatggcaacaacaaggagtatgcagtagtcggtcagcatccttatgaccccgatcacgttatcctgcccgagataatgaaagagaacggatataccaccggtatgttcggcaaatgggcgggaggttatgaaggttcctgctccactccggacaaacgcgggatagacgaatatttcggctacatctgtcagttccaggcccacctttactatcctaatttcctcaatcgctacagcaaggcattaggcgacacaggcgtagtacgtgtcattatggacgagaacatcaagtatccgatgtacggtgccgattatcaaaaacgcccgcaatattcggcggatatgattcaccagaaagcaatggaatggctggatgagcaggacggcaaacaaccgttcttcggagtgctgacttataccctgccccatgcggaactggttcagccggaagactctatcttaaatgaatataaagagaaattcaatcctgacaagagctacaaaggcagcgaaggatcgcgatacaacgcgatcacgcatgtacacgcacaatttgcaggaatgattacgcgactggactactacgtcggagaagtactgaaaaagctgaaagagaaaggactggacgagaatacactggtcattttctccagcgacaacggccctcacgaagaaggcggagctgatcctacattcttcggcagagacggtaaactgcgtggcttgaaacgccaatgctatgaaggaggtatccgtatcccatttatcgcccgctggccgggacgtgtacctgcaggtacagtgaacgaccacatctgcgctttctacgacctgatgcctactttctgcgagatcatcggcgaaaagaattacgtaaagaaatatgcgaacaaagacaaagaagtagattacttcgacggcatttccttcgccccgacattactgggaaagaaaaagcagaaggaacatgacttcctttactgggaatttaatgaaacaaatcagattggcgtacgcatgggagactggaagatggtagtaaagaaagggatacctttcctttataatctggcaacggacattcatgaagacaacaatgtggccgaccagcatccggagattgtagaaaaaatgaaggcagttatctttgcacagcacacgcctaacccaaacttctccgttacactaccggagaagaaataaggtaataaaagtttatcatttaggcacagatttcgcggattacacggttttcagagttgagtaattaaaaaacgtgtagttccgcgaaatccgtgcctgactgttatcaatagccgaataatccgctattgatccgagaatttccgtgcggattctttttcttcctcctgtctcttcctataccggatataccgcagtgaccactcatgcattttcttcagaaactcctcttctgtgagcgtatcatagtaataattaaatatacgctcgtaatagttcaaacacttatcatccctttttttagcatttcgtaagttcccttactcatgcctatagcttgacacatggctgaaatacccactttctcgcatttaagtacctcttcgataaaaaggccgaatgcaaaatgatgatactcttttttcattttttcttgttttaaacgttaataataatttagttgttataaaaatattcacattagttcggatatgtccgaactgccgttatatcattttgtcctaattttgcgctgcgtttcaaaaacagaaccgcattattaaaagaattaacgataaatgttatgacaaacaatttcagaatgtcttatttcatgcccccgattgctcccatcaggaacgaacaaggacaaaccgttacacccgccacactcactcccttctgcgaagtttcggtcgaacaggtatatcagatgatcacctgcaacgaaaacctcaaagcactgaccgaacaagtgcgaagtgccggagacctgcgaatggcaaaagcctctttactcccctacgtaaccccatgcggcatattcatccgccggagtagtaaattcttcgcatcgccttccgggctcgtagtggtagatatagataacctcgactcctatcataaagctatggaaatgcgtcgtacactgttcgacgaccctttcctctgtcccatacttacattcatcagtcccagcggccggggcgtgaaagcattcgtaccttatagcaaactttacgcagacgatcagacacggaacgtaaaagaaagtataaactgggcaatgcaatacatagaaataacctacggagcagaaatgaacgactccacagaaactccgccaaaagccgtagacacctccggcaaagacatcgtaagagcctgtttcctcagccacgacccacaagcactattcagagagtattgaacagtcaatcttgaataaccaacagtgaactatctattatcaattatccattaagaaaatgaccaatattgaatctttacgcctcatcactgaggcagtcgaaacggcaggtgccgacattgcaccctcttacaccgagtacgtacaattagcattcgccatcgcaacagactgtggcgaagcaggacgcgagttttttcaccgcctgtgccggatatccgccaaatatcagcgtgagcatgccgaacgaatgttctccaacgcccttataaagcagcatggagaaatacatctgggaacggcttttcatctcgcagaatcgacaggagtgaaaatctgccgggaggaagttatgaacagccggaaaaatgcagaaaatgcactaaatgcaccctacaattttcccacacacaggcgcgcgtataataaggtggaagaggaagaaaacgacaacgacgaaaacaccaatgctccagaagaactctcgacagacagtgatcctctacaacccctgcctactttccccgaagcagactggcctaaaatcctaatgctcattatgagctatgccacttctcccacacaacgggacatactcttgctcggagcactgaccgcactaggagctacgatggaacgctatgtgagatgttcctattccggaaaataccagtctccttgtctgcaaaccttctttgtagcccctcctgcttcgggaaaaagcggactttcacttatccgcttgctcgtggaacctattcatgacaaaattcgccaacaagtggacgaagaaatgaaagcctatcggaaagaaaagaaaaactatgagttgctgggcaaagagcgtgtcaatacagaagcacctcagatgcctcccaacaaaatgtttcttatctcgggcaacaacagcggcaccggcattctgcaaaatatcatggacgccaacggaacaggactcatctgcgaaaccgaagcggacaccatcgcctccgccatcagttccgaatacggccattggagcgacacgctccgcaaagccttcgaccatgacagactgtcctacaaccgacgtaccgatcaggaataccgggaagtaaagagaatctttcttgccgtcctgctttcggggacacccgcacaagtgagagccctcatcccgtcggcggagaacggacttttctcccgccaactgttctactacatgcatggcatctatacatgggctgaccaatttgcgtgcggagagatagatctggacgaaatcttcaggtccataggcagggattggcaactaaagctggatatactgaaagaacacggcatccatacgcttcgcctcaccgacgagcagaaaaaggaattcaacgctctcttctccgatttgtttttccgttcggacattgccaacggcaacgagatgagaagtttcatagcccgtctggctgtcaatatctgccgcatcatgtcaacgatagccatgttacgggtgttggaaatcccccaaccctatcagcttaagagttctgacagatacgctcctgttccggacaaggaaattcccgcagataacgtcaaggacggcattattacccgttgggatataactatcactcctgaagactttaaagctgttcttgggcttgtaaagcctctctatcggcatgccacgcatatattatctttcctgccatcttcggaaatcccccacagggctaacgccgaccgtgacgccttcttcgatgcgctgggtgacgagttcacccgtacacagttgacggaacaggctacagctatgggaatcaaaccaaacaccgcactctcctggctgagacgtctcgtaaaaaagggcctctttgtcatgaaagaaaaagggacttacgtacgcgcacgtgtgtgcgtgtgttagggatgccccgtaaaagtgcatttttgcatcggttgataactttgcgtcatagggaaataacgttttgtagaagctaaagcactgctttagataccgtaaagctaagctttagaagtcgtaaagcatagctttagctagggttctcccagcgcatccacgatcgccctcacctccaacggagtgtaagaacggtgctgcggctgataacctaaatcggacaggcgttcctgaagaccgggacagcggacaatccatttattcattttgcggtaagcagcaatgccggtaagtt

SEQ ID NO: 4774 - DNA, 601 bp, Unknown
  gut microbiota DNA sequence
caagtatttacgcaagtcatttaccaagctgatttgagtacggttctccacacttttcttttcatactcagcattaccggccaaggcgatctgagcttcactcgtcaaatccgtgataccggcatcacgcttgaaagtctccaaattagcttctgtactacccaattcttttgagataatgccaatacgttcatcgataaattctgctgtcttctgagcgatctcgtttttatcattgttcgtattgcgattatacatttcaagtaactggttgataaagtcctgcccgcgctgcaaactggagttcttcaatgaaatcacagcgacagaagtcgttttagaagtaggagcaatggacaggctgttacaatagccttttgccactctcatcggtttgttgatagtcgcagttatatgacgtacgtttttctctatccgaggaactttcgttccatcttgcaaagttaccgaatcaacttcctgaaagaaagccaatgtaccttcatctgttggaaaaatggcaggtaatttctcaaaatgcttctgatagcccttttcacctacagtcacattcacatccatactaccttcaggctgtaag

SEQ ID NO: 4775 - DNA, 166 bp, Unknown
  gut microbiota DNA sequence
ctccccacgtaatttgaatgcgtttttgctctcatgctctaacaatttgtctgcatccctttattcatcttagtttcaggtatggcagcaactgtggtagcagttatgagagcaagtgtttgctctcactcttccatgtatcattatctgtcatttgtttgatgtt

SEQ ID NO: 4776 - DNA, 318 bp, Unknown
  gut microbiota DNA sequence
ttgacttcattaataccttacgtctcatgcatattactatatatataagacaagtattgacggttctatttttttcttgtactacttgtattgtttatcaatatttcaaagaacttgctgctttcgttttaaaagcgggtgcaaagataagaactttttcagataacttccaaactttttccgaagtttttttgtttttattttctaaagccttaaactttagcagaatgtcaattgttaggctgtccctctcttggaaagcgggtgcaaaagtacgaggttttgctatacaatccaaatatatctgactattttcta

SEQ ID NO: 4777 - DNA, 191 bp, Unknown
  gut microbiota DNA sequence
tcaaagaaaagccgtacttttgcaagccgattattatcacaaaatgataagagattaattcatagcaagttagtcctcctttgtccggggaggctgatatgtggtgaagaaaatttttagtagtaacatttaaaaaacaaaattagagtggatactttaagttacaagaccatttctgcaaacaaagcgac

SEQ ID NO: 4778 - DNA, 14364 bp, Unknown
  gut microbiota DNA sequence
tttctgattacatatttccttgttttacgtcttattattgtattttagaatgatcaatctcacaaaacctaataaaaatgaagaagaaacatgtacttttagtagcttttgcagctgcaatgttgactccgaccgttgtatgggcacaatacccgcagataactgacgaagccaaagcgaattatacaaagatgatgaccgaggaacggaaacgttctgatgaagcatgggagaaagcgttacctatagtactgaaagaagcaaaagaaggacgtccttatatctcatgggctggtcgtccctatgatttgccacaagctagaattccctcgtttccgggtgctgaaggaggcggaatgtatagtttcggtggccgtggtggtaaagtaattacggttactaatctgaatgatcgtggtccgggttcattccgcgaagcttgtgagacaggtggtgcacgtattattgtattcaatgtggctggtatcattcgtttggaatctccgattattgttcgagcaccttacgttactattgccggacagacagcaccgggtgatggtgtctgcattgccggagaatcattttgggtggatacacacgacgtagttgtacgtcatatgagattccgtcgtggagaaacaaaagtatggcatcgtgacgactctttcggtggtaatccgattggtaatatcatgatagaccactgttcatgtacatggggactggacgaaaatatatctttctaccgtcatatgtacgatccgagtgaaggtcaatatgaaagcaaggatttgaagcttccgacagtcaatgtaactattcagaatacaatttctgcgaaagcgctggatacctataaccatgcattcggcagtacgctgggaggtgagaactgtgcatttatgcgtaacctttgggccagcaactctggtcgcaatccgtctgtaggctggaatggagtattcaacttcgttaataatgtagtatttaattgggtgcatcgttcttctgatggtggcgattataccgccatgttcaatatgatcaataactattataaacccggtcctgctactccaaagaataatacggtaggctgccgtattctgaaaccggaagccggacgcagtaaactgaattataaggtatacggtcgcgtgtatgctgatggtaacgttatggaaggctatccggaaatcacgaaagataactggaatggtggtatccaaatcgagagtcagccaaatacagagggatatactgagaatatgcggagctatgagccgtttgcaatgccttatatcaaaattacatcagctaatgatgcttatgattatgtgacaaaacatgttggtgccaatataccctgccgtgatatcgtggacgaacgcatcatagaagaagtaaaaacaggtattccttattatgacaagaaacttgcgaaggatgctaatggtgatcttacaggcttgtctcctaagtcaatgggagaagacggtcagtttaaatatcgtcgtttacctaaagattcttataagataggtatcattactgatattcgtcagatgggtggtttccccgaatataaaggaactccgtatgtggatacggatggtgacggtatgccggatgaatgggaaattgctaatggattgaatccgaatgatccaagtgatgctaataaagattgtacaggtgacggatatacgaatattgaaaagtatatcaatggaatcagtacaaaacacaaagtagactggagagatttaaaaaataactacgatacattggctgagaaaggaaaattaatgtaatctgcaactggtatcggtataagatgccggaactgggtttccttttggcatatggtataaaaaataagatgaaatgaaaaagatagttttaatgtctctgttgttgctttgcggttggatatctgccggagcagtcgatttgaacaaagagaatcgtgatccgaaatatgtagagtctatagtcaatcgttcgcagaaaattgtagataaactaggacttacggatgtgaaagcagccgaagacgtttgtaatattattgccaatcgctatttcgaactgaatgatatttatgaaatacgtgatgcaaaagtaaaaaccgttaaggaatcaggtttgaccggtgatgcgaaaaatgaagcgttgaaggctgctgaaaatgaaaaagatgcagctttgtaccgttctcactttgcttttcctgccagtttatctctctttttgaatgaggaacagatagaagccgtaaaagatggaatgacttatggcgtggtgaaagtgacttatgaagctacgcttgatatgattccttctctgaaagaagaagaaaaggtacaaatctatgcttggttggtggaagcgcgtgagtttgccatggatgcggaaaattcaaataagaaacatgcggctttcggcaagtacaaaggacgtatcaacaattatctggctaagcggggatataatttgacgaaagaacgtgaagagtgggccaaacgtgtgaaagcacggggaggaacgctgtaaaagtatagaatctggtaagaaaggattggtaaccaatgagatactataaaaagaagtggaattctttcccattattaaatggttagtttgtttgatggaggaaagggtggctcggagagtcgccctttttatcgtctctaaattttgattctgacgaatcttccaatctatttgagtacaaatccggcttttcatcgtctctgtataaaggatattagtatagtgtaaaagaatcaatcatagaaatgggaaagttaagaaatacattagctgcaataagcatcctgcttttagcttcttgtggagggaataaagattattatatgttcacttcatttcatgagccggctgatgaaggtttgagatatctgtatagtgaagacggaatgcactgggacagtattcccggtgtctggctgaagccggaattgggacaacatcgcctgatgcgtgacccttccatggtgcgtacaccggatggtacttatcatttggtatggaccaccagctggaaaggggatttaggctttggttatgcaaattccaaagacttgattcactggtcggagcaacaaatgattcctgtaatggcagacgaaccgaccactgtcaatgtatgggctccggagattttttatgatgacgagagcgaacagtttatggtagtatgggcttcatgtgtaccaggtcgttttgaaaaggggatcgaagaagaagagaataatcatcgtttatactacatcactacaaaggattttaagacaatatccaagacgaaagtattatatgatcccggtttcagctcaatcgacgctgtcattgtaaagcgtgcgaaaaatgattatgtaatggtactcaaagataatacacgtcccgaacgtaatctgaaaattgctttttcagactctctgacaggaccttattcgccgtcatcacaaccatttaccgaatcgtttgtagagggaccgactgtcgaaaaattaggtgatgattatctgatctattttgatgtttataaaaagaaaatatatggtgccatgcgtacccgtgattttaagaacttcacggatatcacagaaaatgtgagtgtgcctgtcgggcataaacacggaaccatctttagagcttcagaatcagatgttaaaacattgctggaagaaagcaagaagaaataaacttaaaccggataagttgaatccggaataaactaaaacctgaaataaatcatgaacaactcaacgaagattcttcttgtattggctgtcggatggatggcgactaccattcaggcgcagactccgcaggacagaatccattacacaggaaaagaattatcgaatcccacctatcacgacggacaattatctccggtagtgggagtgcataatattcaactggtgcgtgccaaccgcgagcatccggaagcgtcgaacggcaatggatggacttacaaccatcagcctatgctggcttactggaacggtcagttttattatcagtatctggcagatccgtcagatgaacatgtaccaccttcccaaacgttcctcatgacctcgaaagacggttatcaatggacaaatccggaaatagtgtttcctccttacagagtgccggacggatataccaaagaatcccgtccgggtatgcaggcaaaagacttgattgctatcatgcaccagcgtgtaggcttttatgtatctaagtcgggcagattgattacgatgggaaattatggagtagctttggataagaaagatgatccgaacgacggaaacggtatcggtcgggtagtacgtgagataaagaaggacggttcgttcggaccgatttatttcatttattacaatcatggattcaacgaaaagaataccgattatccctattttaaaaagagcaaagactgggaattcgtaaaggcttgccaggaaatactggataatccgctttatatgatgcaatgggtagaagaagctgaccgtgaagatccgatcattccactgaaaaaaggatataaagcattcaattgctatacattgcccgatggacgcattgcgagtctttggaaacacgctttgacttcgatcagtgaagatgggggacatacctgggcagaacctgtgcttcgtgcaaaaggatttgtcaacagtaatgcgaaaatctggggacaacgtctgagcgatggaacctatgctacggtttataatccgtcggaattccgctggccgttggctatctcattgagtaaggacggattggagtatactacattaaacttggtacatggtgaaattactccgatgcgctatggaggaaattacaaatcatatggtcctcaatatccccgtggcattcaggaaggaaacggagtgcctgcagatggtgatttatgggtttcatatagcgtaaataaagaagatatgtggatttcccgcattcctgttccggtagagattaatgcttctgcacacgcagatgatgattttacgaagtttggatcgatagctgagttgaccaactggaatatttattctccggtttgggcaccggtttctttagaaggagcttggttgaagctacaggataaagatcccttcgactatgcgaaggtagaacgtaagattccggcttcgaaagaattgaaagtctcatttgatttgttggcaggacagaatgataaaggtatacttcagattgatttcctggatgagaacagcattgcctgttcgcgattggaactcactccggacggcattttccgtatgaaaggtggttcacgttttgcgaatatgatgaaatatgaagcgggaaagacttatcatgtagaagcagttctttcgactaccgatcgtaatattcaagtgtatgtggatggtaagagggtagggctgcgtatgttttatgctccggtagcaacgattgaacggattgctttccgtaccggagaaatgcgtacattcccgactgtggatactcctgccgaccaaacgtatgatttgcccgatgcaggcggacaggaaccattggcagaatatcgtatagccaatgtaaagacttcgtccactgataaggacgcttcttccgcttttttgaaatatgcagactttagtcattatgccgaatctttcaatggcatggaagatgaaaatattgttcaggcaattcccaatgccaaagcttcggaatggatggaagaaaatatccctttgtttgaatgcccgcagcgtaattttgaagaaatgtattattatcgttggtggtcattgcgcaagcatatcaaggagactcccgtcggatatggtatgaccgagtttttggttcagcgttcttattcggataagtataacctgattgcctgtgctatcggacatcatatttatgaaagtcgttggttgcgtgatccgaaatatctggatcagattatccatacatggtatcgtggcaatgatggaggaccgatgaagaagatggataagtttagttcatggaatgcagatgctgtactggcacgctatatggtggatggcgataaggatttcatgctggatatgacgaaggatctggaaacggaatatcagcgttgggaacgtaccaaccgtttgaagaacggactgtattggcagggtgatgtacaggatggcatggaggaatccatcagtggcggccgaaaaaagaaatatgcccgtccgacgattaacagctatatgtatggtaatgcaaaagccctttcgataatgggaatcctttccggtgatgaaggaatggctatgaggtatggtatgagagcggatacattaaagagtctcgtagaaaacgatttatggaatacacgccatcagttctttgaaacgatgcgtactgactcttccgccaatgtgcgcgaggcaatcgggtatatcccgtggtatttcaatttaccggacacaacaaagaaatatgaagttgcctggaaagaaattatggatgagaaaggattttctgctccttatggattgactacggcagaacgccgtcatcctgagttccgcacgcgcggagtcggtaaatgtgaatgggacggggctatctggccgtttgcttctgcacagacgttaactgccatggctaatttcatgaataattatcctcagacagttttgtctgacagcgtatatttccgtcagatggaattgtatgtagagtcgcagtatcatcgtggacgtccatatattggcgagtatctggacgaagtaaccggatattggctgaaaggcgatcaggaacggagccgttactataaccattctactttcaatgatttgatgattaccggactggtcggacttcgtccgcgtctggatgatacgatagaggtgaatccgctgattccgacagataaatgggattggttctgtctggataatgttttatatcatggttataatctaacgattctttgggataaaaatggtgatcgctatcattgtggaaaaggattgcgtatttttgtgaatggaaaagaagcaggacatgcagatacgttgacaagacttgtttgcgagaatgcattaaagtgatatatttataacagataagagacagagcaataatgacttttaagaaatatcttcttcttttactttgtctgccatgcttcgtacaggcaaagaatataacgattagccgccttacctgcgaaatgcaggaagggctggtggtcgttgaaagttgtccccgtttgggatggacaatggaatcaccggagaatggcacgagacagactgcttatgaaatagagattagagaggcttttaccggacgttccgtctggaatagtggaaaggtaacttcttcacagagtcagctggttccgactgaaggagcggatatatgtttgaataatccatttaattatagttggcgtgtgcgtgtttgggatgagacggatactccttccgaatggagtcaagaaacaaaattccgtttggcatccgatgacttttcttcagggaaatggatcggagccatcactcgtaaggattcgcaccttcccgaagggcgaaagtttcatggcggtgaattgaagaaaccggaggtgaaagctgcttgggaagcggtagatactttggcaaagaaaagtatttgcttgcgaagaacgtttcagacaggagaggcaaaagggaagaatgcgaatcagaaatccggaaagaaaatcgtggaagctactgcgtacgtttgtggcctgggattttatgagttttctctgaatggcaaaaaaataggagatagtgaatttgctccgctttggagcgattatgataagagtgtttattataatacatacgatgtaacggagcagttacgggatggtgagaatgttgtaggaatcttattggggaatggattctacaatgtacagggagggcgctatcgtaaattgcagattagttttggtcctcccacacttttatttgaattagtaatcaattatgaggatgggacacgcgagacgatccgttcggatcaggggtggaaatatgatctgagtccgataacctttaattgtatttatggaggggaagattatgacgcccgtcgcgaacagaaaggatggaatcaagttggtttcaatgatagccattggcgtccggtagtggttcaggaagcgccgaaaggagtgatccgtccgcagatggcacctccggtgaagattatggaacggtatgatattcagaaagtaaccaagttgaattcagaacaggtgatggctgcttccaaatctaccaaacgaacagtagacccttctgctgttgtgttggatatgggacagaatctggccggttttccggagataaccgtacgtggtaaacgaggacagaaagtcaccttgatagtagcggaagcattgacggatgaaggagcttgtaatcagcgtcagacagggcgtcagcattattatgaatatacactgaaaggtgaaggtgatgaaatctggcatcctcgtttttcatattatggttttcggtacattcaggtagaaggtgctgtcttgaaaggacagaaaaatcctcagaaactgcctgtccttaaaaacattcaatcctgttttgtctataattcggcaaagaaagtctctacattcgaatcttccaaccgaatattcaatgcagctcatcgattgattgagaaggcggttcgcagtaatatgcaatccgtatttaccgattgtccgcatcgggagaaactcggatggctggaacaggtgcacctcaatggaccaggactactctataattatgatctgacggcctatgctccacagattatgcagaatatggcagacgcccagcatccgaatggagcaatgcccacaacggctccggagtatgtagtctttgaaggccccggaatggatgcttttgccgaatccccggagtggggaggttcactggttattttcccgtttatgtactatgaaacttacggagatgattctttgataatgaaatattatcagcatatgcgtcgttacacagactatcttaagactcgggcagataacggtattctttctttcggattgggtgactggtatgattatggagatttccgcgccggattctcccgtaatacacctgttccgttggtggctacggcacattattatatgactgtcatgtatctgataaaggctgcccgaatggtaggcaatgaatttgacgttcgttattacagttcattagcacatgatataatgctagcgtttaacaaacggtttctggatagtaatacagcacaatatggtacagggagtcaagctagtaatgcgcttcccatcttccttcagatgactcaaagtacaggagataaaggagattacacaccggatgcaagtctgactgccaaagtgttgacgaatctgattaaagatgtggaatcacacggcaatcgtttgactaccggagatgtgggaaaccgctatctgattcagacattggcacgtaatggacagcatgagcttatttataagatgttcaatcatgaagaagctcccggatacggcttccagctgaagtttggtgcaactacattgacggagcagtgggacccgcgtcaaggttcttcatggaatcatttcatgatgggacagattgatgaatggttctttaattcattgattggtattcgtccgtctacaacattatcagcttctgtaaatgaaaaggatgagccaatgcaaggttatcagaagtttgtcattgctccgaagccggtaggagacttgaaatacgctaaatcaacttacgagactctctacggtacgattctggtagactggactcgtcagaacggtacttttactctgaatgtatctgtaccggtgaataccactgctatcgtttatcttccaggtgaaaaagaaccgaaagaagtacaaagtgggacatataagtttgttgctgccgaataagatataaaaaagaagaactatttaataatatagaatatgaatttacgaattactcttttgacttttctttgcctttgcgcaacggtgatcctccgtgccgaacgcgtcgatatgttgaaagcgggtgcaaaagcaaatgggaaagctctcaatacaaagctgataaattcaacgattgaccgtttgaatcgtggaggtggaggtacgctcttttttcctgccggaacgtatctgacgggaagtatccatctgaaaagtaacattacgctggaactggaagccggagctatcctgcttttttcagacaactttgacgactatcttccttttgtagaagttcgtcacgaaggagtcatgatgaaaagtttccagccgttaatctatgcggttgatgcggaaaatatcactatcaagggagaaggtacactggatggtcaaggtaagaagtggtggatggagttctttcgtgtaatgattgacctgaaagataatggtatgcgtgatattaataaatatcagccgatgtgggatgctcagaatgatacgactgccatctatgcagagacgaataaggattatgtcagcactttgcagcgtcgttttttccgccctccgttcattcagcctgttcgttgcaagaaggtgaagattgaaggagtgaaaattgtcaattctcctttttggactgttaatccggagttttgtgacaatgtgactatcaaaggaatcacgatagataatgtcccttctcccaacacggatggaatcaatcctgagtcctgccggaatgtacatatcagtgattgccatatttctgtaggtgatgactgcattacgattaaatctggaagagacgcacaagcccgccgcttgggagtgccgtgtgagaatattactattaccaattgtacgatgcttgccggtcatggtggggtagtgatcggcagtgaaatgagtggcagtgtgcgtaaggtcacgatctctaactgtgtatttgacggaaccgaccgtggtatccgcatcaagtcaacccgtggaaggggaggagtcgtagaggatatccgtgtcagcaatatcgtaatgagtaacatcaagcaggaggctgtcgtcttgaatctgaaatacagccaaatgcctgcagaagcaaagagtgagcgtactccgatatttcgtaatgttcatatcagcggtatgactgtgacggatgtaaagactccgattaaaatagtaggactggaagaagctccgatttctgacattgtattgcgtgacatccatattcagggagccaaacagaagtgtatctttgaagattgtgaacgtatcactatggatgacgtaatcattaacggtgaagaaataaaactgaaataaacctcttgggaggttacatatttataaatataagaaaatgaaacgaatccttttctcattgcttctcgctgcatctctttcggcagaagcacagacgcagacatacgagacggaatttgcccgtcccttgaatgaagtattggcagatattcaaaatcgtttcggaatccgtctgaaatatgatattgatacggtaggaaagattttaccttatgctgatttccgtatccgcccttattctgtagaagaatctttgacgaatgtgttgtcaccattcgattacaaatttgtcagacagagcggtaatctatataagttgaaggcttatgaatatcctcgtcgtacagatgctgacggagaaaagatgctggcttatctcaatacgctttatgcagataagcaggcttttgaacttcgtgccgattcattgagaaaagaggtacgtcaacgtttgggaattgatactttattggcccaatgtgtaaactcaacccccattctatcgaaaatacggaagtttgatggctatactgtgcagaattttgcacttgaaactctaccggggctgtatgtttgcggatctgtttatacgcctcaatcgaaagggaaacacgctctgattatttgtccgaacggacattttggtggaggtcgttatcgggaagatcagcagcagcgtatgggcacattagctcgtatgggagctgtttgtgtcgattatgatttgtttggctggggagaatcgattctccaggtggggagtgcagcgcatcgcagtagtgcggcacatactattcaggcaatgaatggattgttgattctcgattatatgcttgcttcccgtaaagatatcgataccaagcgtattggtgccaatggtggttctggtggtggaacgcatactgtactactgacaacgttggatgggcgttttactgcttctgccccggtggttagtctggcttctcatttcgatggcggttgtccttgtgaaagtggtatgcctattcagctatcagcaggaggtacttgtaatgctgaactggctgcaacattcgctcctcgtccgcaattagtggtttctgatggcggggactggacagcaagtgttcctgcacttgaatttccgtatttgcagcgtatctatggattctatgatacgaaaaccaatgtgacgaacgttcatcttcccaaagaaaaacatgatttcggtccgaataaaagaaatgcagtctatgatttctttgccgaagtcttcgatttagataaaaagatgttggatgagagtaaagtaactatcgaaccggagtctgccatgtacagctttggagagaaaggggagctactaccggaaaatgcaattcgttcattcgacaaggtggctgcttattttgataagaaggcttttgccaaattgaaatcggatgcttctcttgaaaagaaagcaatggagtgggtagctttactcaatctggatgatgagaagaaatcaggttttgccgtgacgactatttataatcatcttcgccaggttcgagactggcataatgatcatccatatacgacaatacctgcgggcatcaatcctacaacgggcaaaccgttaactcagctcgaacgtgagataatagcagactcagctatgcccaaggaagttcatgaaagactgatgaaagggctgcgcagagtactgacggaggaacaagttgatcagattttagataaatatacagttggtaaggtagcatttaccatgaaagggtatcaggagattgttcctgatatgacggaggaagaaacagcctttatacttgaacagctgaaactggctcgcgaacaagctgttgattacaaaagcatgaaacagatatctgctatctttaaagcttataaaacaaagatcgaactgtatttctatgaacatggccgtaactggcgccaaatgtataaagactatgcagaaaagcgaaaggcggaaaaagcaaaggaggggaaatagagaatcaaagatacttttttattaatgcatactataagcagcaatacctctgacatagagaggattgctgctttttgcttcatttgcttgtagaataatagactggtcggacatcttttattgcggaaaatgtgttatattgtggacagctaataaaaacgtatattatatggataagcaaaaagtagcattagtcctttctatgggtggcgcacgtggtattgcgcatattggagtcattgaagaattgttacgtcataatttcgagataacttctattgccggaagctcgatgggagcgatggtaggcgcaatgtatgcttcaggtaagctggaggaatgtaaagaatggctctatagctgggataaacgtaagatgtgggaactggcggatctgacattaagtcgggacggcttggtgaagggggatcgttttatcaaagaactgaagcagattattcccattatgaatattgaagatttgcctataccatacgtagcaatggccactgatattgtttgcgatcaggaagtgaggttcgatagcggtaatttgtatgatgctatccgtgctactatttctataccgatgctcttccggcctttacggaaagatggtatggttctgattgacggaggaatactgaatccccttccgctgaatcaggtgcatcgtacggaaggggatattctgatagcagtcgatgtcaatgcttcgattgattgcggtaagaaaaagaaaatgagtccttataacttgttgacagaatcttcaagaatgatgatgcagcaaattacccgttatcagatagaacgttgtcagccggatatcttaattcagatgtccggcaatgcttatgatatgctggagttccatcatgcagcttctattgtggagacgggaatagagattacccgggatgcgttgaatacagaactttattccgtataaatcatttttttcgtcatacctccgtcaatg

SEQ ID NO: 4779 - DNA, 847 bp, Unknown
  gut microbiota DNA sequence
tcaccgttgataaaatcattctcatcccggcagagaaataaacacatacgggcaatatcttccggtttgcccactcgttgggaagggtgctgagaatggtcttctggttggagttgatcataattttgtgtttgtatccaccccggagcaatggagtttactgtgatattccattcggataatgataaagctaatgcatgagtcagagaatagataccacctttagaagctgcataaccttcacttcccggttcactcatcaaataacgtgttgagcagatattaatgatccttccataagggttagaatcagactgtgtcttacgatgaatggcaagtaaccgtgaagtaataaatacaggacgaagattgacggaaagaatcttgtcgaaatctttgacgcttgtttctgtaatggaagaaaatttgctgataccgacattgttgatgaggatgtcaatgtccttccattcatccaatatctgttgcatacagctttcgagtgcttctttatcactaacgtcaacagaatgaaatatggctccggtatctcttgctgtttgttgaccggacacagcattaatgtcacagaaggctacttgatgtccgtctttacagaaagcttctactattgctttccctatgccttctgctccgcctgtcacgaataccttttttttcaggctgtccggttttgaaacaatttcacctgctacctctgttttgacttgactgctggtagccgttttctttttcccatatttctgtgcctgtttccaagctgcttttctggcctcgtattgctcttgttgtctttctatataattatctgccatgattgttttac

SEQ ID NO: 4780 - DNA, 149 bp, Unknown
  gut microbiota DNA sequence
agtgtcaaccttgccactcctgccaattaccgtctgggtcccggtgatgaagtcatcatcgatatctggggtgctagccagaatacgatccgccagcagatctctcctgaaggcaccatcaatattcagaagatcgggcctgtcaacct

SEQ ID NO: 4781 - DNA, 279 bp, Unknown
  gut microbiota DNA sequence
ctgaaggatggccaaacacagggtagcatcctgttccggtgtcttcccccgttgtgaatataaatcgtttatctgtttgtggatggatcgttgtaaggcggaaaggtcatccagatacacgcagcctgcactccccccaccaggaagcagcatgcgtaccaaatttaataaaccctctatgttttcctgtaaaataacagcatccatatccctcgccttaaacagccgccataataggctctacataaccgacaggcatatccacacaggcacatccca

SEQ ID NO: 4782 - DNA, 325 bp, Unknown
  gut microbiota DNA sequence
ttttccctccggcgtggcactgcaatgaatgataatcagtgtgatggtccgcataagtttacatacagctttgtactcctatcaaaccacctacagcagtagcgacagtgatgattactttgataatgaaactccaaacggaacgggatgatgaattactcatagtttttgattttaaatgaaaaaaatattgatttttaatgagtctttagccgtgataagctaaagactttgccagtgttcaggttatgacttaaacagtcgggtccggtgcttcttcgtctccttcgtccggattaggtttcggatcgggagtgttgcctga
